(19) United States
(12) Patent Application Publication
(10) Pub. No.: US 2025/0049838 A1
(43) Pub. Date: Feb. 13, 2025

(54) Antisense Compounds Targeting Genes Associated with Cystic Fibrosis

(71) Applicant: Rosalind Franklin University of Medicine and Science, North Chicago, IL (US)

(72) Inventors: Michelle L. HASTINGS, North Chicago, IL (US); Wren E. MICHAELS, North Chicago, IL (US)

(21) Appl. No.: 18/933,256

(22) Filed: Oct. 31, 2024

Related U.S. Application Data
(63) Continuation-in-part of application No. 17/472,887, filed on Sep. 13, 2021.
Application No. 17/472,887 is a continuation of application No. 16/730,517, filed on Dec. 30, 2019, now Pat. No. 11,116,785.
Application No. 16/730,517 is a continuation of application No. 15/835,698, filed on Dec. 8, 2017, now Pat. No. 10,525,076.
Application No. 15/835,698 is a continuation-in-part of application No. 15/045,999, filed on Feb. 17, 2016, now Pat. No. 9,840,709.
(60) Provisional application No. 62/118,794, filed on Feb. 20, 2015.
(60) Provisional application No. 63/148,682, filed on Feb. 12, 2021.
(60) Provisional application No. 63/594,941, filed on Oct. 31, 2023.

(51) Int. Cl. A61K 31/712; C12N 15/113

(52) U.S. Cl. CPC A61K 31/712; C12N 15/1138; A01K 2267/0306; C12N 2310/11; C12N 2310/321; C12N 2310/3233; C12N 2320/33

(57) ABSTRACT

The present disclosure relates generally to compounds comprising oligonucleotides complementary to a cystic fibrosis transmembrane conductance regulator (CFTR) RNA transcript. Certain such compounds are useful for hybridizing to a CFTR RNA transcript, including but not limited to a CFTR RNA transcript in a cell. In certain embodiments, such hybridization results in modulation of splicing and/or expression of the CFTR transcript. In certain embodiments, such compounds are used to treat one or more symptoms associated with Cystic Fibrosis.

### CROSS REFERENCE TO RELATED APPLICATIONS

[0001] This application is a continuation-in-part of U.S. application Ser. No. 17/472,887, filed Sep. 13, 2021, which is a continuation-in-part of U.S. application Ser. No. 16/730,517, filed Dec. 30, 2019 (now U.S. Pat. No. 11,116,785, issued Sep. 14, 2021), which is a continuation of U.S. application Ser. No. 15/835,698, filed Dec. 8, 2017 (now U.S. Pat. No. 10,525,076, issued Jan. 7, 2020), which is a continuation-in-part of U.S. application Ser. No. 15/045,999, filed Feb. 17, 2016 (now U.S. Pat. No. 9,840,709, issued Dec. 12, 2017), which is a non-provisional application of U.S. Provisional Application No. 62/118,794, filed Feb. 20, 2015, the disclosures of which each of which are incorporated by reference in their entirety. U.S. application Ser. No. 17/472,887 claims the benefit of priority to U.S. Provisional Application No. 63/148,682, filed Feb. 12, 2021, the disclosure of which is incorporated by reference in its entirety. This application also claims the benefit of priority to U.S. Provisional Application No. 63/594,941, filed Oct. 31, 2023, the disclosure of which is incorporated by reference in its entirety.

### SEQUENCE LISTING

[0002] A computer readable form of the Sequence Listing is filed with this application by electronic submission and is incorporated into this application by reference in its entirety. The Sequence Listing is contained in the XML file created on Oct. 31, 2024, having the file name “15-311-US-CIP3_Sequence-Listing.xml” and is 704,427 bytes in size.

### FIELD OF THE DISCLOSURE

[0003] The present disclosure relates generally to compounds comprising oligonucleotides complementary to a cystic fibrosis transmembrane conductance regulator (CFTR) RNA transcript. Certain such compounds are useful for hybridizing to a CFTR transcript, including but not limited to a CFTR RNA transcript in a cell. In certain embodiments, such hybridization results in modulation of expression and/or splicing of the CFTR transcript. In certain embodiments, such compounds are used to treat one or more symptoms associated with Cystic Fibrosis.

### BACKGROUND OF THE DISCLOSURE

[0004] Cystic fibrosis (CF), also known as mucoviscidosis, is a genetic disorder that affects mostly the lungs, but also the pancreas, liver, kidneys, and intestine. Long-term issues include difficulty breathing and coughing up mucus as a result of frequent lung infections. Other signs and symptoms include sinus infections, poor growth, fatty stool, clubbing of the fingers and toes, and infertility in males among others. Different people may have different degrees of symptoms.

[0005] CF is inherited in an autosomal recessive manner. It is caused by the presence of mutations in both copies of the gene for the cystic fibrosis transmembrane conductance regulator (CFTR) protein. Those with a single working copy are carriers and otherwise mostly normal. CFTR is involved in production of sweat, digestive fluids, and mucus. When CFTR is not functional, secretions, which are usually thin, instead become thick. The condition is diagnosed by a sweat test and genetic testing. Screening of infants at birth takes place in some areas of the world.

[0006] There is no cure for cystic fibrosis. Lung infections are treated with antibiotics which may be given intravenously, inhaled, or by mouth. Sometimes the antibiotic azithromycin is used long term. Inhaled hypertonic saline and salbutamol may also be useful. Lung transplantation may be an option if lung function continues to worsen. Pancreatic enzyme replacement and fat-soluble vitamin supplementation are important, especially in the young. The average life expectancy is between 42 and 50 years in the developed world. While CF is a multi-organ disease, lung problems are the dominant cause of morbidity and mortality. Other CF symptoms include pancreatic insufficiency, intestinal obstruction, elevated electrolyte levels in sweat (the basis of the most common diagnostic test), and male infertility. CF is most common among people of Northern European ancestry and affects about one out of every 2,500 to 4,000 newborns. About one in 25 people are carriers. While treatments for Cystic Fibrosis are available, more effective therapies are needed.

### SUMMARY OF THE DISCLOSURE

[0007] The present disclosure relates to general compounds and methods to treat cystic fibrosis in subjects using antisense oligonucleotides (ASOs) that induce specific pre-mRNA splicing events in CFTR gene transcripts that result in mRNAs that code for proteins that fully or partially restore the function of CFTR (i.e., resulting in increased levels of correctly localized CFTR protein at the plasma membrane and with increased function).

[0008] In one aspect, the disclosure provides a composition comprising two or more modified oligonucleotides, wherein each of the one or more modified oligonucleotides consists of 8 to 30 linked nucleosides, wherein the nucleobase sequence of each of the one or more modified oligonucleotides is at least 80%, complementary to an equal-length portion of a target region of a cystic fibrosis transmembrane conductance regulator (CFTR) transcript, wherein the target region is within: (a) nucleobase 198,888 and nucleobase 199,094 of SEQ ID NO: 130; or (b) nucleobase 199,705 and nucleobase 199,796 of SEQ ID NO: 130. In some embodiments, the target region is within nucleobase 198,888 and nucleobase 199,796 of SEQ ID NO: 130, and each of the one or more modified oligonucleotides is selected from the group consisting of SEQ ID NOs: 174-181. In certain embodiments, the target region is within nucleobase 198,888 and nucleobase 199,094 of SEQ ID NO: 130, and each of the one or more modified oligonucleotides is selected from the group consisting of SEQ ID NOs: 174-177. In some embodiments, the target region is within nucleobase 199,705 and nucleobase 199,796 of SEQ ID NO: 130, and each of the one or more modified oligonucleotides is selected from the group consisting of SEQ ID NOs: 178-181.

[0009] In another aspect, the disclosure provides a compound comprising a modified oligonucleotide having 8 to 30 linked nucleosides having a nucleobase sequence comprising a complementary region, wherein the complementary region comprises at least 8 contiguous nucleobases complementary to an equal-length portion of a target region of a cystic fibrosis transmembrane conductance regulator (CFTR) transcript. In certain embodiments, the target region of the CFTR transcript comprises at least a portion of intron 1, exon 2, intron 2, intron 3, exon 4, intron 4, exon 5, intron 6, exon 7, intron 7, exon 9, intron 9, exon 10, intron 10, exon 11, intron 11, intron 12, exon 13, intron 13, intron 14, exon 15, intron 15, exon 16, intron 16, intron 19, exon 20, intron 20, intron 21, exon 22, intron 22, exon 23, intron 23, exon 24 or intron 24, exon 25, intron 25, exon 26 or intron 26 of the CFTR transcript. In other embodiments, the nucleobase sequence of the antisense oligonucleotide comprises any one of SEQ ID NOs: 1 to 144, SEQ ID NO:150, or SEQ ID NOs: 174-181.

[0010] In another aspect, the disclosure provides a pharmaceutical composition comprising at least one compound as described herein and a pharmaceutically acceptable carrier or diluent.

[0011] In yet another aspect, the disclosure provides a method of modulating splicing or expression of a CFTR transcript in a cell comprising contacting the cell with at least one compound as described herein.

[0012] The yet another aspect, the disclosure provides a method of treating cystic fibrosis, comprising administering at least one compound as described herein to an animal in need thereof.

[0013] In yet another aspect, the disclosure provides a method of modulating splicing or expression of a CFTR transcript in a cell comprising administering to an animal in need thereof a composition comprising one or more modified oligonucleotides, wherein each of the one or more modified oligonucleotides consists of 8 to 30 linked nucleosides, wherein the nucleobase sequence of each of the two or more modified oligonucleotide is at least 80%, complementary to an equal-length portion of a target region of a cystic fibrosis transmembrane conductance regulator (CFTR) transcript. In some embodiments, the target region is within nucleobase 198,888 and nucleobase 199,094 of SEQ ID NO: 130. In some embodiments, the target region is within nucleobase 199,705 and nucleobase 199,796 of SEQ ID NO: 130. In some embodiments, the target region is within nucleobase 198,888 and nucleobase 199,094 of SEQ ID NO: 130, and each of the two or more modified oligonucleotides is selected from the group consisting of SEQ ID NOs: 174-177. In certain embodiments, the target region is within nucleobase 199,705 and nucleobase 199,796 of SEQ ID NO: 130, and each of the two or more modified oligonucleotides is selected from the group consisting of SEQ ID NOs: 178-181. In certain embodiments, the administering step comprises delivering to the animal by inhalation, parenteral injection or infusion, intravenous injection, intrauterine, oral, subcutaneous or intramuscular injection, buccal, transdermal, transmucosal and topical.

[0014] The present disclosure provides the following non-limiting numbered embodiments:
[0015] Embodiment 1a. A compound comprising a modified oligonucleotide consisting of 8 to 30 linked nucleosides and having a nucleobase sequence comprising a complementary region, wherein the complementary region comprises at least 8 contiguous nucleobases complementary to an equal-length portion of a target region of a cystic fibrosis transmembrane conductance regulator (CFTR) transcript.
[0016] Embodiment 1b. A compound comprising two or more modified oligonucleotides, wherein each of the two or more modified oligonucleotides consists of 8 to 30 linked nucleosides, wherein the nucleobase sequence of each of the two or more modified oligonucleotides is at least 80%, complementary to an equal-length portion of a target region of a cystic fibrosis transmembrane conductance regulator (CFTR) transcript.
[0017] Embodiment 2a. The compound of embodiment 1, wherein the target region of the CFTR transcript comprises at least a portion of intron 1, exon 2, intron 2, intron 3, exon 4, intron 4, exon 5, intron 6, exon 7, intron 7, exon 9, intron 9, exon 10, intron 10, exon 11, intron 11, intron 12, exon 13, intron 13, intron 14, exon 15, intron 15, exon 16, intron 16, intron 19, exon 20, intron 20, intron 21, exon 22, intron 22, exon 23, intron 23, exon 24 intron 24, exon 25, intron 25, exon 26 or intron 26 of the CFTR transcript.
[0018] Embodiment 2b. The compound of embodiment 1, wherein the target region of the CFTR transcript is within: (a) nucleobase 198,888 and nucleobase 199,094 of SEQ ID NO: 130; or (b) nucleobase 199,705 and nucleobase 199,796 of SEQ ID NO: 130.
[0019] Embodiment 3. The compound of embodiment 1, wherein the target region of the CFTR transcript is within about 25 nucleobases upstream or about 25 nucleobases downstream of exon 2, or comprises at least a portion of exon 2 of the CFTR transcript.
[0020] Embodiment 4. The compound of embodiment 1, wherein the target region of the CFTR transcript is within about 25 nucleobases upstream or about 25 nucleobases downstream of exon 4, or comprises at least a portion of exon 4 of the CFTR transcript.
[0021] Embodiment 5. The compound of embodiment 1, wherein the target region of the CFTR transcript is within about 25 nucleobases upstream or about 25 nucleobases downstream of exon 5, or comprises at least a portion of exon 5 of the CFTR transcript.
[0022] Embodiment 6. The compound of embodiment 1, wherein the target region of the CFTR transcript is within about 25 nucleobases upstream or about 25 nucleobases downstream of exon 7, or comprises at least a portion of exon 7 of the CFTR transcript.
[0023] Embodiment 7. The compound of embodiment 1, wherein the target region of the CFTR transcript is within about 25 nucleobases upstream or about 25 nucleobases downstream of exon 9, or comprises at least a portion of exon 9 of the CFTR transcript.
[0024] Embodiment 8. The compound of embodiment 1, wherein the target region of the CFTR transcript is within about 25 nucleobases upstream or about 25 nucleobases downstream of exon 10, or comprises at least a portion of exon 10 of the CFTR transcript.
[0025] Embodiment 9. The compound of embodiment 1, wherein the target region of the CFTR transcript is within about 25 nucleobases upstream or about 25 nucleobases downstream of exon 11, or comprises at least a portion of exon 11 of the CFTR transcript.
[0026] Embodiment 10. The compound of embodiment 1, wherein the target region of the CFTR transcript is within about 25 nucleobases upstream or about 25 nucleobases downstream of exon 13, or comprises at least a portion of exon 13 of the CFTR transcript.
[0027] Embodiment 11. The compound of embodiment 1, wherein the target region of the CFTR transcript is within about 25 nucleobases upstream or about 25 nucleobases downstream of exon 15, or comprises at least a portion of exon 15 of the CFTR transcript.
[0028] Embodiment 12. The compound of embodiment 1, wherein the target region of the CFTR transcript is within about 25 nucleobases upstream or about 25 nucleobases downstream of exon 16, or comprises at least a portion of exon 16 of the CFTR transcript.
[0029] Embodiment 13. The compound of embodiment 1, wherein the target region of the CFTR transcript is within about 25 nucleobases upstream or about 25 nucleobases downstream of exon 20, or comprises at least a portion of exon 20 of the CFTR transcript.
[0030] Embodiment 14. The compound of embodiment 1, wherein the target region of the CFTR transcript is within about 25 nucleobases upstream or about 25 nucleobases downstream of exon 22, or comprises at least a portion of exon 22 of the CFTR transcript.
[0031] Embodiment 15. The compound of embodiment 1, wherein the target region of the CFTR transcript is within about 25 nucleobases upstream or about 25 nucleobases downstream of exon 23, or comprises at least a portion of exon 23 of the CFTR transcript.
[0032] Embodiment 16a. The compound of embodiment 1, wherein the target region of the CFTR transcript is within about 25 nucleobases upstream or about 25 nucleobases downstream of exon 24, or comprises at least a portion of exon 24 of the CFTR transcript.
[0033] Embodiment 16b. The compound of embodiment 1, wherein the target region of the CFTR transcript is within about 25 nucleobases upstream or about 25 nucleobases downstream of exon 25, or comprises at least a portion of exon 25 of the CFTR transcript.
[0034] Embodiment 16c. The compound of embodiment 1, wherein the target region of the CFTR transcript is within about 25 nucleobases upstream or about 25 nucleobases downstream of exon 26, or comprises at least a portion of exon 26 of the CFTR transcript.
[0035] Embodiment 17. The compound of any of embodiments 1 to 16, wherein the complementary region of the modified oligonucleotide is at least 80%, at least 85%, at least 90%, at least 95% or at least 100% complementary to the target region.
[0036] Embodiment 18. The compound of any of embodiments 1 to 17, wherein the complementary region of the modified oligonucleotide comprises at least 10 contiguous nucleobases.
[0037] Embodiment 19. The compound of any of embodiments 1 to 17, wherein the complementary region of the modified oligonucleotide comprises at least 12 contiguous nucleobases.
[0038] Embodiment 20. The compound of any of embodiments 1 to 17, wherein the complementary region of the modified oligonucleotide comprises at least 14 contiguous nucleobases.
[0039] Embodiment 21. The compound of any of embodiments 1 to 17, wherein the complementary region of the modified oligonucleotide comprises at least 15 contiguous nucleobases.
[0040] Embodiment 22. The compound of any of embodiments 1 to 17, wherein the complementary region of the modified oligonucleotide comprises at least 16 contiguous nucleobases.
[0041] Embodiment 23. The compound of any of embodiments 1 to 17, wherein the complementary region of the modified oligonucleotide comprises at least 17 contiguous nucleobases.
[0042] Embodiment 24. The compound of any of embodiments 1 to 17, wherein the complementary region of the modified oligonucleotide comprises at least 18 contiguous nucleobases.
[0043] Embodiment 25. The compound of any of embodiments 1 to 17, wherein the complementary region of the modified oligonucleotide comprises at least 19 contiguous nucleobases.
[0044] Embodiment 26. The compound of any of embodiments 1 to 17, wherein the complementary region of the modified oligonucleotide comprises at least 20 contiguous nucleobases.
[0045] Embodiment 27. The compound of any of embodiments 1 to 26, wherein the nucleobase sequence of the oligonucleotide is at least 80% complementary to an equal-length region of the CFTR transcript, as measured over the entire length of the oligonucleotide.
[0046] Embodiment 28. The compound of any of embodiments 1 to 26, wherein the nucleobase sequence of the oligonucleotide is at least 90% complementary to an equal-length region of the CFTR transcript, as measured over the entire length of the oligonucleotide.
[0047] Embodiment 29. The compound of any of embodiments 1 to 26, wherein the nucleobase sequence of the oligonucleotide is 100% complementary to an equal-length region of the CFTR transcript, as measured over the entire length of the oligonucleotide.
[0048] Embodiment 30. The compound of any of embodiments 1-29, wherein the nucleobase sequence of the antisense oligonucleotide comprises any one of SEQ ID NOs: 1 to 144, SEQ ID NO: 150, or SEQ ID NOs: 174-181.
[0049] Embodiment 31. The compound of any of embodiments 1-30, wherein the modified oligonucleotide comprises at least one modified nucleoside.
[0050] Embodiment 32. The compound of embodiment 31, wherein at least one modified nucleoside comprises a modified sugar moiety.
[0051] Embodiment 33. The compound of embodiment 32, wherein at least one modified sugar moiety is a 2 ‘-substituted sugar moiety.
[0052] Embodiment 34. The compound of embodiment 33, wherein the 2’-substitutent of at least one 2 ‘-substituted sugar moiety is selected from among: 2’-OMe, 2′-F, and 2′-MOE.
[0053] Embodiment 35. The compound of any of embodiments 31-34, wherein the 2′-substiuent of at least one 2 ‘-substituted sugar moiety is a 2’-MOE.
[0054] Embodiment 36. The compound of any of embodiments 1-47, wherein at least one modified sugar moiety is a bicyclic sugar moiety.
[0055] Embodiment 37. The compound of embodiment 36, wherein at least one bicyclic sugar moiety is LNA or cEt.
[0056] Embodiment 38. The compound of any of embodiments 1-37, wherein at least one sugar moiety is a sugar surrogate.
[0057] Embodiment 39. The compound of embodiment 38, wherein at least one sugar surrogate is a morpholino.
[0058] Embodiment 40. The compound of embodiment 38, wherein at least one sugar surrogate is a modified morpholino.
[0059] Embodiment 41. The compound of any of embodiments 1-40, wherein the modified oligonucleotide comprises at least 5 modified nucleosides, each independently comprising a modified sugar moiety.
[0060] Embodiment 42. The compound of embodiment 41, wherein the modified oligonucleotide comprises at least 10 modified nucleosides, each independently comprising a modified sugar moiety.
[0061] Embodiment 43. The compound of embodiment 41, wherein the modified oligonucleotide comprises at least 15 modified nucleosides, each independently comprising a modified sugar moiety.
[0062] Embodiment 44. The compound of embodiment 41, wherein each nucleoside of the modified oligonucleotide is a modified nucleoside, each independently comprising a modified sugar moiety
[0063] Embodiment 45. The compound of any of embodiments 1-44, wherein the modified oligonucleotide comprises at least two modified nucleosides comprising modified sugar moieties that are the same as one another.
[0064] Embodiment 46. The compound of any of embodiments 1-44, wherein the modified oligonucleotide comprises at least two modified nucleosides comprising modified sugar moieties that are different from one another.
[0065] Embodiment 47. The compound of any of embodiments 1-46, wherein the modified oligonucleotide comprises a modified region of at least 5 contiguous modified nucleosides.
[0066] Embodiment 48. The compound of any of embodiments 1 to 47, wherein the modified oligonucleotide comprises a modified region of at least 10 contiguous modified nucleosides.
[0067] Embodiment 49. The compound of any of embodiments 1 to 48, wherein the modified oligonucleotide comprises a modified region of at least 15 contiguous modified nucleosides.
[0068] Embodiment 50. The compound of any of embodiments 1 to 48, wherein the modified oligonucleotide comprises a modified region of at least 20 contiguous modified nucleosides.
[0069] Embodiment 51. The compound of any of embodiments 45 to 50, wherein each modified nucleoside of the modified region has a modified sugar moiety independently selected from among: 2′-F, 2′-OMe, 2′-MOE, cEt, LNA, morpholino, and modified morpholino.
[0070] Embodiment 52. The compound of any of embodiments 45 to 51 wherein the modified nucleosides of the modified region each comprise the same modification as one another.
[0071] Embodiment 53. The compound of embodiment 52, wherein the modified nucleosides of the modified region each comprise the same 2 ‘-substituted sugar moiety.
[0072] Embodiment 54. The compound of embodiment 52, wherein the 2’-substituted sugar moiety of the modified nucleosides of the region of modified nucleosides is selected from 2′-F. 2′-OMe, and 2′-MOE.
[0073] Embodiment 55. The compound of embodiment 54, wherein the 2 ‘-substituted sugar moiety of the modified nucleosides of the region of modified nucleosides is 2’-MOE.
[0074] Embodiment 56. The compound of embodiment 52, wherein the modified nucleosides of the region of modified nucleosides each comprise the same bicyclic sugar moiety.
[0075] Embodiment 57. The compound of embodiment 56, wherein the bicyclic sugar moiety of the modified nucleosides of the region of modified nucleosides is selected from LNA and cEt.
[0076] Embodiment 58. The compound of embodiment 50, wherein the modified nucleosides of the region of modified nucleosides each comprises a sugar surrogate.
[0077] Embodiment 59. The compound of embodiment 58, wherein the sugar surrogate of the modified nucleosides of the region of modified nucleosides is a morpholino.
[0078] Embodiment 60. The compound of embodiment 59, wherein the sugar surrogate of the modified nucleosides of the region of modified nucleosides is a modified morpholino.
[0079] Embodiment 61. The compound of any of embodiments 1 to 60, wherein the modified nucleotide comprises no more than 4 contiguous naturally occurring nucleosides.
[0080] Embodiment 62. The compound of any of embodiments 1 to 61, wherein each nucleoside of the modified oligonucleotide is a modified nucleoside.
[0081] Embodiment 63. The compound of embodiment 62, wherein each modified nucleoside comprises a modified sugar moiety.
[0082] Embodiment 64. The compound of embodiment 63, wherein the modified nucleosides of the modified oligonucleotide comprise the same modification as one another.
[0083] Embodiment 65. The compound of embodiment 64, wherein the modified nucleosides of the modified oligonucleotide each comprise the same 2 ‘-substituted sugar moiety.
[0084] Embodiment 66. The compound of embodiment 65, wherein the 2’-substituted sugar moiety of the modified oligonucleotide is selected from 2′-F, 2′-OMe, and 2′-MOE.
[0085] Embodiment 67. The compound of embodiment 65, wherein the 2 ‘-substituted sugar moiety of the modified oligonucleotide is 2’-MOE.
[0086] Embodiment 68. The compound of embodiment 64, wherein the modified nucleosides of the modified oligonucleotide each comprise the same bicyclic sugar moiety.
[0087] Embodiment 69. The compound of embodiment 68, wherein the bicyclic sugar moiety of the modified oligonucleotide is selected from LNA and cEt.
[0088] Embodiment 70. The compound of embodiment 64, wherein the modified nucleosides of the modified oligonucleotide each comprises a sugar surrogate.
[0089] Embodiment 71. The compound of embodiment 70, wherein the sugar surrogate of the modified oligonucleotide is a morpholino.
[0090] Embodiment 72. The compound of embodiment 70, wherein the sugar surrogate of the modified oligonucleotide is a modified morpholino.
[0091] Embodiment 73. The compound of any of embodiments 1 to 72, wherein the modified oligonucleotide comprises at least one modified internucleoside linkage.
[0092] Embodiment 74. The compound of embodiment 73, wherein each internucleoside linkage is a modified internucleoside linkage.
[0093] Embodiment 75. The compound of embodiment 73 or 74, comprising at least one phosphorothioate internucleoside linkage.
[0094] Embodiment 76. The compound of embodiment 73, wherein each internucleoside linkage is a modified internucleoside linkage and wherein each internucleoside linkage comprises the same modification.
[0095] Embodiment 77. The compound of embodiment 76, wherein each internucleoside linkage is a phosphorothioate internucleoside linkage.
[0096] Embodiment 78. The compound of any of embodiments 1 to 77, comprising at least one conjugate.
[0097] Embodiment 79. The compound of any of embodiments 1 to 78, consisting of the modified oligonucleotide.
[0098] Embodiment 80. The compound of any of embodiments 1 to 79, wherein the compound modulates splicing and/or expression of the CFTR transcript.
[0099] Embodiment 81. The compound of any of embodiments 1 to 80, having a nucleobase sequence comprising any of the sequences as set forth in SEQ ID Nos: 1 to 144, SEQ ID NO:150, or SEQ ID Nos: 174-181.
[0100] Embodiment 82. The compound of any of embodiments 1 to 81, having a nucleobase sequence comprising any of the sequences as set forth in SEQ ID Nos: 64, 65, 66, 71, 76, 78, 79, 81, 82, 84, 91, 92, 93, 94, 102, 111, 116, 117, 120, 122, 127, 128 or 129.
[0101] Embodiment 83. The compound of any of embodiments 1 to 81, having a nucleobase sequence comprising any of the sequences as set forth in SEQ ID Nos: 1, 4, 8, 9, 10, 12, 13, 17, 18, 19, 20, 22, 23, 24, 26, 27, 36, 37, 38, 42, 43, 44, 47, 48, 49, 50, 53, 55, 57, 59 or 60.
[0102] Embodiment 84a. The compound of any of embodiments 1 to 81, having a nucleobase sequence comprising SEQ ID NO: 174-177.
[0103] Embodiment 84b. The compound of any of embodiments 1 to 81, having a nucleobase sequence comprising SEQ ID NO: 178-181.
[0104] Embodiment 84c. The compound of any of embodiments 1-84b, further comprising one or more CFTR modulators.
[0105] Embodiment 84d. The compound of embodiment 84c, wherein the one or more CFTR modulators are selected from ivacaftor (VX-770), lumacaftor (VX-809), tezacaftor (VX-661), elexacaftor (VX-445), bamocaftor (VX-659), olacaftor (VX-440), vanzacaftor (VX-121), deutivacaftor (VX-561) (formerly CTP-656), VX-152, ABBV-2222 (galicaftor, formerly GLPG2222), ABBV-3221, ABBV-3067, ABBV-191, ABBV-974 (formerly GLPG-1837), ABBV-2451 (formerly GLPG-2451), ABBV-3067 (formerly GLPG3067), ELX-02 (NB124), FDL169, cavonstat (N91115), MRT5005, ataluren (PTC124), posencaftor (PTI-801), nesolicaftor (PTI-428), sodium 4-phenylbutarate (4PBA), SION-638, SION-109, SION-451, SION-719, VRT-532, N6022, or combinations thereof.
[0106] Embodiment 85. A pharmaceutical composition comprising a compound according to any of embodiments 1-84d and a pharmaceutically acceptable carrier or diluent.
[0107] Embodiment 86. The pharmaceutical composition of embodiment 85, wherein the pharmaceutically acceptable carrier or diluent is sterile saline.
[0108] Embodiment 87. A method of modulating splicing and/or expression of a CFTR transcript in a cell comprising contacting the cell with a compound according to any of embodiments 1-86.

[0109] Embodiment 88. The method of embodiment 87, wherein the cell is in vitro.
[0110] Embodiment 89. The method of embodiment 87, wherein the cell is in an animal.
[0111] Embodiment 90. The method of any of embodiments 87 to 89, wherein the amount of CFTR mRNA without exon 4, exon 11, and/or exon 16 is increased.
[0112] Embodiment 91. The method of any of embodiments 87 to 89, wherein the amount of CFTR mRNA without exon 23 and/or exon 24 is increased.
[0113] Embodiment 92. The method of any of embodiments 87 to 89, wherein the amount of CFTR mRNA without exon 25 and/or exon 26 is increased.
[0114] Embodiment 93. The method of any of embodiments 87 to 92, wherein the CFTR transcript is transcribed from a CFTR gene.
[0115] Embodiment 94. A method of modulating the expression of CFTR in a cell, comprising contacting the cell with a compound according to any of embodiments 1-86.
[0116] Embodiment 95. The method of embodiment 94, wherein the cell is in vitro.
[0117] Embodiment 96. The method of embodiment 94, wherein the cell is in an animal.
[0118] Embodiment 97. A method comprising administering the compound according to any of embodiments 1-84d or the pharmaceutical composition of embodiments 85 or 86 to an animal.
[0119] Embodiment 98. The method of embodiment 97, wherein the administering step comprises delivering to the animal by inhalation, parenteral injection or infusion, intravenous injection, intrauterine, oral, subcutaneous or intramuscular injection, buccal, transdermal, transmucosal, and topical.
[0120] Embodiment 99. The method of embodiment 98, wherein the administration is by inhalation.
[0121] Embodiment 100. The method of any of embodiments 97-99, wherein the animal has one or more symptoms associated with cystic fibrosis.
[0122] Embodiment 101. The method of any of embodiments 97-99, wherein the administration results in amelioration of at least one symptom of cystic fibrosis.
[0123] Embodiment 102. The method of any of embodiments 97-101, wherein the animal is a mouse.
[0124] Embodiment 103. The method of any of embodiments 97-101, wherein the animal is a human.
[0125] Embodiment 104. A method of treating cystic fibrosis, comprising administering the compound according to any of embodiments 1-84d or the pharmaceutical composition of embodiments 85 or 86 to an animal in need thereof.
[0126] Embodiment 105. Use of the compound according to any of embodiments 1-84d or the pharmaceutical composition of embodiments 85 or 86 for the preparation of a medicament for use in the treatment of cystic fibrosis.
[0127] Embodiment 106. Use of the compound according to any of embodiments 1-84d or the pharmaceutical composition of embodiments 85 or 86 for the preparation of a medicament for use in the amelioration of one or more symptoms associated with cystic fibrosis.
[0128] Embodiment 107a. A compound comprising a modified oligonucleotide consisting of 8 to 30 linked nucleosides and having a nucleobase sequence comprising a complementary region, wherein the complementary region comprises at least 8 contiguous nucleobases complementary to an equal-length portion of a target region of a CFTR transcript.
[0129] Embodiment 107b. A compound comprising two or more modified oligonucleotides consisting of 8 to 30 linked nucleosides and each of the two more modified oligonucleotides having a nucleobase sequence comprising a complementary region, wherein the complementary region comprises at least 8 contiguous nucleobases complementary to an equal-length portion of a target region of a CFTR transcript.
[0130] Embodiment 108. The compound of embodiment 107, wherein the CFTR transcript comprises the nucleobase sequence of SEQ ID No. 130.
[0131] Embodiment 109. The compound of embodiment 107 or 108, wherein the complementary region of the modified oligonucleotide is 100% complementary to the target region.
[0132] Embodiment 110. The compound of any of embodiments 107-109, wherein the complementary region of the modified oligonucleotide(s) comprises at least 10 contiguous nucleobases.
[0133] Embodiment 111. The compound of any of embodiments 107-109, wherein the complementary region of the modified oligonucleotide(s) comprises at least 12 contiguous nucleobases.
[0134] Embodiment 112. The compound of any of embodiments 107-109, wherein the complementary region of the modified oligonucleotide(s) comprises at least 14 contiguous nucleobases.
[0135] Embodiment 113. The compound of any of embodiments 107-109, wherein the complementary region of the modified oligonucleotide(s) comprises at least 15 contiguous nucleobases.
[0136] Embodiment 114. The compound of any of embodiments 107-109, wherein the complementary region of the modified oligonucleotide(s) comprises at least 16 contiguous nucleobases.
[0137] Embodiment 115. The compound of any of embodiments 107-109, wherein the complementary region of the modified oligonucleotide(s) comprises at least 17 contiguous nucleobases.
[0138] Embodiment 116. The compound of any of embodiments 107-109, wherein the complementary region of the modified oligonucleotide(s) comprises at least 18 contiguous nucleobases.
[0139] Embodiment 117. The compound of any of embodiments 107-116, wherein the nucleobase sequence of the modified oligonucleotide(s) is at least 80% complementary to an equal-length region of the CFTR transcript, as measured over the entire length of the oligonucleotide.
[0140] Embodiment 118. The compound of any of embodiments 107-116, wherein the nucleobase sequence of the modified oligonucleotide(s) is at least 90% complementary to an equal-length region of the CFTR transcript, as measured over the entire length of the oligonucleotide.
[0141] Embodiment 119. The compound of any of embodiments 107-116, wherein the nucleobase sequence of the modified oligonucleotide(s) is 100% complementary to an equal-length region of the CFTR transcript, as measured over the entire length of the oligonucleotide.
[0142] Embodiment 120. The compound of any of embodiments 107-119, wherein the target region is within intron 1, exon 2, intron 2, intron 3, exon 4, intron 4, exon 5, intron 6, exon 7, intron 7, exon 9, intron 9, exon 10, intron 10, exon 11, intron 11, intron 12, exon 13, intron 13, intron 14, exon 15, intron 15, exon 16, intron 16, intron 19, exon 20, intron 20, intron 21, exon 22, intron 22, exon 23, intron 23, exon 24, or intron 24 of human CFTR, or wherein the target region is about 25 nucleobases upstream or about 25 nucleobases downstream of intron 1, exon 2, intron 2, intron 3, exon 4, intron 4, exon 5, intron 6, exon 7, intron 7, exon 9, intron 9, exon 10, intron 10, exon 11, intron 11, intron 12, exon 13, intron 13, intron 14, exon 15, intron 15, exon 16, intron 16, intron 19, exon 20, intron 20, intron 21, exon 22, intron 22, exon 23, intron 23, exon 24, intron 24, exon 25, intron 25, exon 26, or intron 26 of human CFTR.
[0143] Embodiment 121. The compound of embodiment 120, wherein the target region is within exon 4 or exon 11 of human CFTR, or is about 25 nucleobases upstream or about 25 nucleobases downstream of exon 4 or exon 11 of human CFTR.
[0144] Embodiment 122a. The compound of embodiment 120, wherein the target region is within exon 23 or exon 24 of human CFTR, or is about 25 nucleobases upstream or about 25 nucleobases downstream of exon 23 or exon 24 of human CFTR.
[0145] Embodiment 122b. The compound of embodiment 120, wherein the target region is within exon 25 or exon 26 of human CFTR, or is about 25 nucleobases upstream or about 25 nucleobases downstream of exon 25 or exon 26 of human CFTR.
[0146] Embodiment 123. The compound of any of embodiments 107-119, wherein the target region is within intron 1, exon 2, intron 2, intron 3, exon 4, intron 4, exon 5, intron 6, exon 7, intron 7, exon 9, intron 9, exon 10, intron 10, exon 11, intron 11, intron 12, exon 13, intron 13, intron 14, exon 15, intron 15, exon 16, intron 16, intron 19, exon 20, intron 20, intron 21, exon 22, intron 22, exon 23, intron 23, exon 24 or intron 24 of mouse CFTR, or is about 25 nucleobases upstream or about 25 nucleobases downstream of intron 1, exon 2, intron 2, intron 3, exon 4, intron 4, exon 5, intron 6, exon 7, intron 7, exon 9, intron 9, exon 10, intron 10, exon 11, intron 11, intron 12, exon 13, intron 13, intron 14, exon 15, intron 15, exon 16, intron 16, intron 19, exon 20, intron 20, intron 21, exon 22, intron 22, exon 23, intron 23, exon 24 or intron 24 of mouse CFTR.
[0147] Embodiment 124. The compound of any of embodiments 107-119, wherein the modified oligonucleotide has a nucleobase sequence comprising any of the sequences as set forth in SEQ ID NOs: 1-144, SEQ ID NO: 150, and SEQ ID NO: 174-181.
[0148] Embodiment 125. The compound of any of embodiments 107-119, wherein the modified oligonucleotide has a nucleobase sequence consisting of the nucleobase sequence of any one of SEQ ID NOs: 1-144, SEQ ID NO:150, and SEQ ID NO: 174-181.
[0149] Embodiment 126. The compound of any of embodiments 107-119, wherein the modified oligonucleotide has a nucleobase sequence comprising the nucleobase sequence of SEQ ID NO: 64, 65, 66, 71, 76, 78, 79, 81, 82, 84, 91, 92, 93, 94, 97, 99, 100, 102, 103, 104, 111, 114, 116, 117, 120, 122, 127, 128, 129, 150, 174, 175, 176, 177, 178, 179, 180, or 181.
[0150] Embodiment 127. The compound of any of embodiments 107-119, wherein the modified oligonucleotide has a nucleobase sequence consisting of the nucleobase sequence of SEQ ID NO: 64, 65, 66, 71, 76, 78, 79, 81, 82, 84, 91, 92, 93, 94, 97, 99, 100, 102, 103, 104, 111, 114, 116, 117, 120, 122, 127, 128, 129, 150, 174, 175, 176, 177, 178, 179, 180, or 181.
[0151] Embodiment 128a. The compound of any of embodiments 107-119, wherein the modified oligonucleotide has a nucleobase sequence comprising the nucleobase sequence of SEQ ID NO: 91, 97, 99, 100, 103, 104, 110, 114, 126, 127, 128, 129, 150, 174, 175, 176, 177, 178, 179, 180, or 181.
[0152] Embodiment 128b. The compound of any of embodiments 107-119, wherein the modified oligonucleotide has a nucleobase sequence comprising the nucleobase sequence of SEQ ID NO: 65-70, 123-126, or 127-129, 174, 175, 176, 177, 178, 179, 180, or 181.
[0153] Embodiment 129a. The compound of embodiment 107-119, wherein the modified oligonucleotide has a nucleobase sequence consisting of the nucleobase sequence of SEQ ID NO: 91, 97, 99, 100, 103, 104, 110, 114, 126, 127, 128, 129, 150, 174, 175, 176, 177, 178, 179, 180, or 181.
[0154] Embodiment 129b. The compound of embodiment 107-119, wherein the modified oligonucleotide has a nucleobase sequence consisting of the nucleobase sequence of SEQ ID NO: 65-70, 123-126, 127-129, 174, 175, 176, 177, 178, 179, 180, or 181.
[0155] Embodiment 130. The compound of any of embodiments 107-129, wherein the modified oligonucleotide comprises at least one modified nucleoside.
[0156] Embodiment 131. The compound of any of embodiments 107-130, wherein each nucleoside of the modified oligonucleotide is a modified nucleoside selected from among: 2′-OMe, 2′-F, and 2′-MOE or a sugar surrogate.
[0157] Embodiment 132. The compound of embodiment 132, wherein the modified nucleoside is 2′-MOE.
[0158] Embodiment 133. The compound of embodiment 132, wherein the modified nucleoside is a morpholino.
[0159] Embodiment 134. The compound of embodiment 131, wherein at least one modified nucleoside comprises a modified sugar moiety.
[0160] Embodiment 135. The compound of embodiment 134, wherein at least one modified sugar moiety is a 2 ‘-substituted sugar moiety.
[0161] Embodiment 136. The compound of embodiment 135, wherein the 2’-substitutent of at least one 2 ‘-substituted sugar moiety is selected from among: 2’-OMe, 2′-F, and 2′-MOE.
[0162] Embodiment 137. The compound of any of embodiments 135-136, wherein the 2′-substiuent of at least one 2 ‘-substituted sugar moiety is a 2’-MOE.
[0163] Embodiment 138. The compound of any of embodiments 107-137, wherein at least one modified sugar moiety is a bicyclic sugar moiety.
[0164] Embodiment 139. The compound of embodiment 138, wherein at least one bicyclic sugar moiety is LNA or cEt.
[0165] Embodiment 140. The compound of any of embodiments 107-139, wherein at least one sugar moiety is a sugar surrogate.
[0166] Embodiment 141. The compound of embodiment 140, wherein at least one sugar surrogate is a morpholino.
[0167] Embodiment 142. The compound of embodiment 141, wherein at least one sugar surrogate is a modified morpholino.
[0168] Embodiment 143. The compound of any of embodiments 107-142, wherein the modified oligonucleotide comprises at least 5 modified nucleosides, each independently comprising a modified sugar moiety.
[0169] Embodiment 144. The compound of any of embodiments 107-143, wherein the modified oligonucleotide comprises at least 10 modified nucleosides, each independently comprising a modified sugar moiety.
[0170] Embodiment 145. The compound of any of embodiments 107-143, wherein the modified oligonucleotide comprises at least 15 modified nucleosides, each independently comprising a modified sugar moiety.
[0171] Embodiment 146. The compound of any of embodiments 107-143, wherein each nucleoside of the modified oligonucleotide is a modified nucleoside, each independently comprising a modified sugar moiety.
[0172] Embodiment 147. The compound of any of embodiments 107-146, wherein the modified oligonucleotide comprises at least two modified nucleosides comprising modified sugar moieties that are the same as one another.
[0173] Embodiment 148. The compound of any of embodiments 107-146, wherein the modified oligonucleotide comprises at least two modified nucleosides comprising modified sugar moieties that are different from one another.
[0174] Embodiment 149. The compound of any of embodiments 107-148, wherein the modified oligonucleotide comprises a modified region of at least 5 contiguous modified nucleosides.
[0175] Embodiment 150. The compound of any of embodiments 107-148, wherein the modified oligonucleotide comprises a modified region of at least 10 contiguous modified nucleosides.
[0176] Embodiment 151. The compound of any of embodiments 107-148, wherein the modified oligonucleotide comprises a modified region of at least 15 contiguous modified nucleosides.
[0177] Embodiment 152. The compound of any of embodiments 107-148, wherein the modified oligonucleotide comprises a modified region of at least 16 contiguous modified nucleosides.
[0178] Embodiment 153. The compound of any of embodiments 107-148, wherein the modified oligonucleotide comprises a modified region of at least 17 contiguous modified nucleosides.
[0179] Embodiment 154. The compound of any of embodiments 107-148, wherein the modified oligonucleotide comprises a modified region of at least 18 contiguous modified nucleosides.
[0180] Embodiment 155. The compound of any of embodiments 107-148, wherein the modified oligonucleotide comprises a modified region of at least 20 contiguous modified nucleosides.
[0181] Embodiment 156. The compound of any of embodiments 149-155, wherein each modified nucleoside of the modified region has a modified sugar moiety independently selected from among: 2′-F, 2′-OMe, 2′-MOE, cEt, LNA, morpholino, and modified morpholino.
[0182] Embodiment 157. The compound of any of embodiments 149-156, wherein the modified nucleosides of the modified region each comprise the same modification as one another.
[0183] Embodiment 158. The compound of embodiment 157, wherein the modified nucleosides of the modified region each comprise the same 2 ‘-substituted sugar moiety.
[0184] Embodiment 159. The compound of embodiment 157, wherein the 2’-substituted sugar moiety of the modified nucleosides of the region of modified nucleosides is selected from 2′-F. 2′-OMe, and 2′-MOE.
[0185] Embodiment 160. The compound of embodiment 157, wherein the 2 ‘-substituted sugar moiety of the modified nucleosides of the region of modified nucleosides is 2’-MOE.
[0186] Embodiment 161. The compound of embodiment 157, wherein the modified nucleosides of the region of modified nucleosides each comprise the same bicyclic sugar moiety.
[0187] Embodiment 162. The compound of embodiment 161, wherein the bicyclic sugar moiety of the modified nucleosides of the region of modified nucleosides is selected from LNA and cEt.
[0188] Embodiment 163. The compound of embodiment 157, wherein the modified nucleosides of the region of modified nucleosides each comprises a sugar surrogate.
[0189] Embodiment 164. The compound of embodiment 163, wherein the sugar surrogate of the modified nucleosides of the region of modified nucleosides is a morpholino.
[0190] Embodiment 165. The compound of embodiment 163, wherein the sugar surrogate of the modified nucleosides of the region of modified nucleosides is a modified morpholino.
[0191] Embodiment 166. The compound of any of embodiments 107-165, wherein the modified nucleotide comprises no more than 4 contiguous naturally occurring nucleosides.
[0192] Embodiment 167. The compound of any of embodiments 107-165, wherein each nucleoside of the modified oligonucleotide is a modified nucleoside.
[0193] Embodiment 168. The compound of embodiment 167, wherein each modified nucleoside comprises a modified sugar moiety.
[0194] Embodiment 169. The compound of embodiment 168, wherein the modified nucleosides of the modified oligonucleotide comprise the same modification as one another.
[0195] Embodiment 170. The compound of embodiment 169, wherein the modified nucleosides of the modified oligonucleotide each comprise the same 2 ‘-substituted sugar moiety.
[0196] Embodiment 171. The compound of embodiment 170, wherein the 2’-substituted sugar moiety of the modified oligonucleotide is selected from 2′-F. 2′-OMe, and 2′-MOE.
[0197] Embodiment 172. The compound of embodiment 170, wherein the 2 ‘-substituted sugar moiety of the modified oligonucleotide is 2’-MOE.
[0198] Embodiment 173. The compound of embodiment 171, wherein the modified nucleosides of the modified oligonucleotide each comprise the same bicyclic sugar moiety.
[0199] Embodiment 174. The compound of embodiment 173, wherein the bicyclic sugar moiety of the modified oligonucleotide is selected from LNA and cEt.
[0200] Embodiment 175. The compound of embodiment 169, wherein the modified nucleosides of the modified oligonucleotide each comprises a sugar surrogate.
[0201] Embodiment 176. The compound of embodiment 175, wherein the sugar surrogate of the modified oligonucleotide is a morpholino.
[0202] Embodiment 177. The compound of embodiment 175, wherein the sugar surrogate of the modified oligonucleotide is a modified morpholino.
[0203] Embodiment 178. The compound of any of embodiments 107-177, wherein the modified oligonucleotide comprises at least one modified internucleoside linkage.
[0204] Embodiment 179. The compound of embodiment 178, wherein each internucleoside linkage is a modified internucleoside linkage.
[0205] Embodiment 180. The compound of embodiment 178 or 179, comprising at least one phosphorothioate internucleoside linkage.
[0206] Embodiment 181. The compound of embodiment 179, wherein each internucleoside linkage is a modified internucleoside linkage and wherein each internucleoside linkage comprises the same modification.
[0207] Embodiment 182. The compound of embodiment 181, wherein each internucleoside linkage is a phosphorothioate internucleoside linkage.
[0208] Embodiment 183. The compound of any of embodiments 107-182, comprising at least one conjugate.
[0209] Embodiment 184. The compound of any of embodiments 107-183, consisting of the modified oligonucleotide.
[0210] Embodiment 185. The compound of any of embodiments 107-184, wherein the compound modulates splicing and/or expression of the CFTR transcript.
[0211] Embodiment 186. A pharmaceutical composition comprising a compound according to any of embodiments 107-186 and a pharmaceutically acceptable carrier or diluent.
[0212] Embodiment 187. The pharmaceutical composition of embodiment 186, wherein the pharmaceutically acceptable carrier or diluent is sterile saline.
[0213] Embodiment 188. A method of modulating splicing of a CFTR transcript in a cell comprising contacting the cell with a compound according to any of embodiments 107-187.
[0214] Embodiment 189. The method of embodiment 188, wherein the cell is in vitro.
[0215] Embodiment 190. The method of embodiment 188, wherein the cell is in an animal.
[0216] Embodiment 191. The method of any of embodiments 188-190, wherein the amount of CFTR mRNA without exon 4 and/or exon 16 is increased.
[0217] Embodiment 192. The method of any of embodiments 188-190, wherein the amount of CFTR mRNA without exon 23 and/or exon 24 is increased.
[0218] Embodiment 193. The method of any of embodiments 188-190, wherein the amount of CFTR mRNA without exon 25 and/or exon 26 is increased.
[0219] Embodiment 194. The method of any of embodiments 188-193, wherein the CFTR transcript is transcribed from a CFTR gene.
[0220] Embodiment 195. A method of modulating the expression of CFTR in a cell, comprising contacting the cell with a compound according to any of embodiments 107-185.
[0221] Embodiment 196. The method of embodiment 195, wherein the cell is in vitro.
[0222] Embodiment 197. The method of embodiment 195, wherein the cell is in an animal.
[0223] Embodiment 198. A method comprising administering the compound of any of embodiments 107-185 to an animal.
[0224] Embodiment 199. The method of embodiment 198, wherein the administering step comprises delivering to the animal by inhalation, parenteral injection or infusion, oral, subcutaneous or intramuscular injection, buccal, transdermal, transmucosal and topical.
[0225] Embodiment 200. The method of embodiment 198, wherein the administration is inhalation.
[0226] Embodiment 201. The method of any of embodiments 198-200, wherein the animal has one or more symptoms associated with cystic fibrosis.
[0227] Embodiment 202. The method of any of embodiments 198-200, wherein the administration results in amelioration of at least one symptom of cystic fibrosis.
[0228] Embodiment 203. The method of any of embodiments 198-202, wherein the animal is a mouse.
[0229] Embodiment 204. The method of any of embodiments 198-202, wherein the animal is a human.
[0230] Embodiment 205. A method of preventing or slowing one or more symptoms associated with cystic fibrosis, comprising administering the compound according to any of embodiments 107-185 to an animal in need thereof.
[0231] Embodiment 205a. The method of embodiment 205, further comprising administering one or more Cystic fibrosis transmembrane conductance regulator (CFTR) modulators.
[0232] Embodiment 205b. The method of embodiment 205a, wherein the one or more CFTR modulators are selected from ivacaftor (VX-770), lumacaftor (VX-809), tezacaftor (VX-661), elexacaftor (VX-445), bamocaftor (VX-659), olacaftor (VX-440), vanzacaftor (VX-121), deutivacaftor (VX-561) (formerly CTP-656), VX-152, ABBV-2222 (galicaftor, formerly GLPG2222), ABBV-3221, ABBV-3067, ABBV-191, ABBV-974 (formerly GLPG-1837), ABBV-2451 (formerly GLPG-2451), ABBV-3067 (formerly GLPG3067), ELX-02 (NB124), FDL169, cavonstat (N91115), MRT5005, ataluren (PTC124), posencaftor (PTI-801), nesolicaftor (PTI-428), sodium 4-phenylbutarate (4PBA), SION-638, SION-109, SION-451, SION-719, VRT-532, N6022, or combinations thereof.
[0233] Embodiment 206. The method of embodiment 205, wherein the animal is a human.
[0234] Embodiment 207. Use of the compound according to any of embodiments 107-185 for the preparation of a medicament for use in the treatment of cystic fibrosis.
[0235] Embodiment 208. Use of the compound according to any of embodiments 107-185 for the preparation of a medicament for use in the amelioration of one or more symptoms associated with cystic fibrosis.

[0236] These and other features and advantages of the present disclosure will be more fully understood from the following detailed description of the invention taken together with the accompanying claims. It is noted that the scope of the claims is defined by the recitations therein and not by the specific discussion of features and advantages set forth in the present description.

### BRIEF DESCRIPTION OF THE DRAWINGS

[0237] A better understanding of the disclosure may be obtained in light of the following drawings which are set forth for illustrative purposes, and should not be construed as limiting the scope of the disclosure in any way.

[0238] FIG. 1A shows a map of the murine/mouse CFTR gene. Boxes represent exons and lines represent introns. The exons that can be skipped or spliced out of the mature mRNA and still maintain the open reading frame of the mRNA are shaded. The CFTR mRNAs lacking any one of these exons will code for a full-length CFTR protein with an internal deletion of the specific targeted exon sequence.

[0239] FIG. 1B shows antisense oligonucleotides induce skipping of targeted exons 2, 4, 5, 7 and 9 of the murine CFTR gene-derived pre-mRNA. Polyacrylamide gel images of radio-labeled reverse-transcription/polymerase chain reaction (RT-PCR) products separated by electrophoresis are shown. RT-PCR was performed on RNA isolated from a mouse primary cell line treated with the indicated ASO or treated with vehicle (saline) only (−). The products were amplified with primers specific to exons flanking the specific ASO-targeted exon in order to resolve the full-length (FL) and exon-skipped (*) products. The targeted exon is indicated at the top of the gel image. PCR products were quantitated and the percent of the products that are skipped [Exon skipped/(Full-length+skipped)]x 100 is shown below the gel image.

[0240] FIG. 1C shows antisense oligonucleotides induce skipping of targeted exons 10, 11, 13 and 15 of the murine CFTR gene-derived pre-mRNA. Polyacrylamide gel images of radio-labeled reverse-transcription/polymerase chain reaction (RT-PCR) products separated by electrophoresis are shown. RT-PCR was performed on RNA isolated from a mouse primary cell line treated with the indicated ASO or treated with vehicle (saline) only (−). The products were amplified with primers specific to exons flanking the specific ASO-targeted exon in order to resolve the full-length (FL) and exon-skipped (*) products. The targeted exon is indicated at the top of the gel image. PCR products were quantitated and the percent of the products that are skipped [Exon skipped/(Full-length+skipped)]×100 is shown below the gel image.

[0241] FIG. 1D shows antisense oligonucleotides induce skipping of targeted exons 20, 22, 23 and 24 of the murine CFTR gene-derived pre-mRNA. Polyacrylamide gel images of radio-labeled reverse-transcription/polymerase chain reaction (RT-PCR) products separated by electrophoresis are shown. RT-PCR was performed on RNA isolated from a mouse primary cell line treated with the indicated ASO or treated with vehicle (saline) only (−). The products were amplified with primers specific to exons flanking the specific ASO-targeted exon in order to resolve the full-length (FL) and exon-skipped (*) products. The targeted exon is indicated at the top of the gel image. PCR products were quantitated and the percent of the products that are skipped [Exon skipped/(Full-length+skipped)]×100 is shown below the gel image.

[0242] FIG. 2A shows a map of the human CFTR gene. Boxes represent exons and lines represent introns. The exons that can be skipped or spliced out of the mature mRNA and still maintain the open reading frame of the mRNA are shaded. The CFTR mRNAs lacking any one of these exons will code for a full-length CFTR protein with an internal deletion of the specific targeted exon sequence.

[0243] FIG. 2B show antisense oligonucleotides induce skipping of targeted exons 2, 4, 5 and 7 of the human CFTR gene-derived pre-mRNA. Agarose gel images of reverse-transcription/polymerase chain reaction (RT-PCR) products separated by electrophoresis are shown. RT-PCR was performed on RNA isolated from human T84 epithelial cells treated with the indicated ASO or treated with vehicle (saline) only (−) or a reaction lacking cDNA (−RT). The products were amplified with primers specific to exons flanking the specific ASO-targeted exon in order to resolve the full-length (FL; +) and exon-skipped (*) products. The targeted exon is indicated at the bottom of the gel and by the first numbers in the name of the ASOs.

[0244] FIG. 2C show antisense oligonucleotides induce skipping of targeted exons 9, 10, 11, 13 and 15 of the human CFTR gene-derived pre-mRNA. Agarose gel images of reverse-transcription/polymerase chain reaction (RT-PCR) products separated by electrophoresis are shown. RT-PCR was performed on RNA isolated from human T84 epithelial cells treated with the indicated ASO or treated with vehicle (saline) only (−) or a reaction lacking cDNA (−RT). The products were amplified with primers specific to exons flanking the specific ASO-targeted exon in order to resolve the full-length (FL; +) and exon-skipped (*) products. The targeted exon is indicated at the bottom of the gel and by the first numbers in the name of the ASOs.

[0245] FIG. 2D show antisense oligonucleotides induce skipping of targeted exons 20, 22, 23 and 24 of the human CFTR gene-derived pre-mRNA. Agarose gel images of reverse-transcription/polymerase chain reaction (RT-PCR) products separated by electrophoresis are shown. RT-PCR was performed on RNA isolated from human T84 epithelial cells treated with the indicated ASO or treated with vehicle (saline) only (−) or a reaction lacking cDNA (−RT). The products were amplified with primers specific to exons flanking the specific ASO-targeted exon in order to resolve the full-length (FL; +) and exon-skipped (*) products. The targeted exon is indicated at the bottom of the gel and by the first numbers in the name of the ASOs.

[0246] FIG. 3A shows a schematic of the splicing pattern of human CFTR c.2789+5G>A without and with ASO targeting. Boxes are exons and lines are introns. Diagonal lines indicate splicing pathway

[0247] FIG. 3B demonstrates that antisense oligonucleotides correct splicing of human CFTR exon 16 with c.2789+5G>A mutation. Polyacrylamide gel images of reverse-transcription/polymerase chain reaction (RT-PCR) products were separated by electrophoresis. RT-PCR was performed on RNA isolated from human lymphoblast cell line GM11859, whose donor is homozygous for G-to-A substitution at nucleotide 2789+5 in intron 16 which results in an mRNA splicing defect (2789+5G>A). Cells were treated with the indicated ASO. The products were amplified with primers specific to exons flanking the specific ASO-targeted exon in order to resolve the full-length (FL) and exon-skipped products. ASO 16-8 was effective at correcting exon 16 splicing of CFTRc.2789+5G>A.

[0248] FIG. 4 shows the genomic DNA of exon 2 in human CFTR and surrounding introns (the sequence of FIG. 4 is given the sequence identifier SEQ ID NO: 131).

[0249] FIG. 5 shows the genomic DNA of exon 4 in human CFTR and surrounding introns (the sequence of FIG. 5 is given the sequence identifier SEQ ID NO: 132).

[0250] FIG. 6 shows the genomic DNA of exon 5 in human CFTR and surrounding introns (the sequence of FIG. 6 is given the sequence identifier SEQ ID NO: 133).

[0251] FIG. 7 shows the genomic DNA of exon 7 in human CFTR and surrounding introns (the sequence of FIG. 7 is given the sequence identifier SEQ ID NO: 134).

[0252] FIG. 8 shows the genomic DNA of exon 9 in human CFTR and surrounding introns (the sequence of FIG. 8 is given the sequence identifier SEQ ID NO: 135).

[0253] FIG. 9 shows the genomic DNA of exon 10 in human CFTR and surrounding introns (the sequence of FIG. 9 is given the sequence identifier SEQ ID NO: 136).

[0254] FIG. 10 shows the genomic DNA of exon 11 in human CFTR and surrounding introns (the sequence of FIG. 10 is given the sequence identifier SEQ ID NO: 137).

[0255] FIG. 11 shows the genomic DNA of exon 13 in human CFTR and surrounding introns (the sequence of FIG. 11 is given the sequence identifier SEQ ID NO: 138).

[0256] FIG. 12 shows the genomic DNA of exon 15 in human CFTR and surrounding introns (the sequence of FIG. 12 is given the sequence identifier SEQ ID NO: 139).

[0257] FIG. 13 shows the genomic DNA of exon 16 in human CFTR and surrounding introns (the sequence of FIG. 13 is given the sequence identifier SEQ ID NO: 140).

[0258] FIG. 14 shows the genomic DNA of exon 20 in human CFTR and surrounding introns (the sequence of FIG. 14 is given the sequence identifier SEQ ID NO: 141).

[0259] FIG. 15 shows the genomic DNA of exon 22 in human CFTR and surrounding introns (the sequence of FIG. 15 is given the sequence identifier SEQ ID NO: 142).

[0260] FIG. 16 shows the genomic DNA of exon 23 in human CFTR and surrounding introns (the sequence of FIG. 16 is given the sequence identifier SEQ ID NO: 143).

[0261] FIG. 17 shows the genomic DNA of exon 24 in human CFTR and surrounding introns (the sequence of FIG. 17 is given the sequence identifier SEQ ID NO: 144).

[0262] FIG. 18A shows a comparison of the AUC forskolin-stimulated HCAI-CFTR exon deletion channel activity in Fischer Rat Thyroid (FRT) cells to HCAI empty vector. Error bars represent SEM (*p<. 05. *** p<. 001, n=4, two-tailed t-test compared to HCAI empty vector).

[0263] FIG. 18B shows representative Gt traces of CFTR exon 4, exon 7, exon 23, and exon 24 deletion constructs in Fischer Rat Thyroid (FRT) cells in comparison to HCAI empty vector.

[0264] FIG. 19A shows a radioactive RT-PCR of CFTR RNA isolated from hippocampus that demonstrates that ASO 5-1 induces CFTR exon 5 skipping in vivo. Splice isoforms are labeled and exon 5 skipping quantification is shown at the bottom.

[0265] FIG. 19B shows a quantitation of the RT-PCR analysis of the RNA exon 5 skipping induced by ASO treatment. Approximately 60% of mouse CFTR gene exon 5 is skipped when mice are treated with ASO 5-1 by ICV injection.

[0266] FIG. 20A shows a schematic for antisense oligonucleotides to correct CFTR 2789+5 G>A splicing mutation.

[0267] FIG. 20B shows a radioactive RT-PCR of CFTR RNA isolated from 2789+5 patient lymphoblast cells transfected with ASOs (15 μM) for 48 hours. The results demonstrate correction of CFTR splicing in 2789+5 patient lymphoblast cells using ASOs. The CFTR spliced isoforms are labelled. T84 cells were analyzed as a positive control for wild-type CFTR splicing.

[0268] FIG. 20C shows a quantitation of the RT-PCR analysis of the RNA splice correction induced by ASO treatment in patient lymphoblast cells.

[0269] FIG. 21A shows a schematic for antisense oligonucleotides to correct CFTR 3272-26A>G splicing mutation.

[0270] FIG. 21B shows a radioactive RT-PCR of CFTR RNA isolated from 3272-26A>G patient lymphoblast cells transfected with ASOs (15 μM) for 48 hours. The results demonstrate correction of CFTR splicing in 3272-26A>G patient lymphoblast cells using ASOs. The CFTR spliced isoforms are labelled. T84 cells were analyzed as a positive control for wild-type CFTR splicing.

[0271] FIG. 22A shows a diagram of ASOs used for the correction of CFTR splicing in 3849+10 kb patient lymphoblast cells using ASOs. The +10C>T mutation is labeled.

[0272] FIG. 22B shows the results of a RT-PCR assay of CFTR RNA isolated from 3849+10 kb patient lymphoblast cells transfected with ASOs (15 μM) for 48 hours. Results indicate a correction of CFTR splicing in 3849+10 kb patient lymphoblast cells using the ASOs. CFTR spliced isoforms are labeled. T84 cells were analyzed as a positive control for wild-type CFTR splicing (FL=Full-Length).

[0273] FIG. 22C shows a quantitation of the RT-PCR analysis of the RNA splice correction induced by ASO treatment in patient lymphoblast cells. The results indicate about a four-fold reduction of inclusion of the cryptic exon, resulting in approximately 93% of the CFTR transcripts being full-length.

[0274] FIG. 23A shows that ASO-+10 kb rescues CFTR function similar to Corr951 (VX-770) in patient HBE cells. The graph depicts the area under the curve (AUC) of time from forskolin+VX-770-stimulation of CFTR channels following indicated treatment. Error bars represent SEM (two-tailed t-test, n=2).

[0275] FIG. 23B shows ASO-+10 kb rescues CFTR function similar to Corr951 in patient HBE cells. Representative Ieq traces of treatment (Corr951 or ASO-+10 kb) compared to control (ASO-C, top, or DMSO, bottom).

[0276] FIG. 24A shows a diagram of primer sets used to analyze splice correction by ASO-10+kb. Primer set A-B is designed to amplify ASO corrected WT isoform splicing specific to the splice mutant allele. Primer set C-D is designed to analyze the amount of uncorrected mutant splicing

[0277] FIG. 24B show a quantification of total mRNA transcribed from the CFTR 3849+10 KB allele indicates an increase with ASO-+10 kb treatment (A-B primer set shown in FIG. 24A).

[0278] FIG. 24C shows a quantification of mutant, cryptically spliced mRNA isoform shows decrease of aberrant mRNA with ASO-+10 kb treatment (C-D primer set shown in FIG. 24A).

[0279] FIG. 25A shows a schematic of CFTR exon 23 region relative to its position within NBD2 and the position of the CFTR-W1282X mutation.

[0280] FIG. 25B shows a schematic of the CFTR protein encoded by the CFTR-W1282X and CFTR-Δ23 expression plasmids.

[0281] FIG. 25C shows average conductance traces from FRT cells stably transfected with the CFTR-Δ23 or CFTR-W1282X plasmids, or empty vector. Cells were pre-treated with vehicle (solid lines) or C18 (dashed lines) for 24 hours. Baseline conductance measurements were taken for 20 minutes. The time of compound additions is indicated.

[0282] FIG. 25D shows average AUC/min was quantified for the forskolin or forskolin+VX-770 20 minute test periods for each construct (+SEM; CFTR-W1282X, N=3, CFTR-Δ23, N=6, empty vector, N=5; two-way ANOVA: Sidak's multiple comparison test within groups: **** p<. 0001).

[0283] FIG. 25E shows immunoblot analysis of CFTR protein, Band C and Band B, isolated from in FRT cells stably transfected with CFTR-WT, CFTR-Δ23, and CFTR-W1282X constructs. β-actin was used as a control for protein expression.

[0284] FIG. 25F shows quantification of total CFTR C band from E, normalized to β-actin.

[0285] FIG. 25G shows average conductance traces from FRT cells stably transfected with CFTR-A23, CFTR-WT, or empty vector. Cells were pre-treated with vehicle (solid lines), C18 (dashed lines) or VX-661+VX-445 (dotted lines) for 24 hours. Baseline conductance measurements were taken for 20 minutes. The addition of compounds is indicated.

[0286] FIG. 25H shows AUC of CFTR-Δ23 conductance was calculated for each modulator treatment (indicated on the X-axis) as the percent CFTR-WT untreated with modulators (+SEM; N=3 except VX-661+VX-445 treatment N=1; one-way ANOVA: Sidak′s multiple comparison test: * p<. 05).

[0287] FIG. 26A shows a schematic of the CFTR disruption caused by the W1282X-CFTR mutation in exon 23. The G>A mutation creates a premature termination codon (PTC) in exon 23 leading to degradation of the mRNA transcript via nonsense mediated mRNA decay, drastically reducing production of semi-functional truncated W1282X-CFTR protein. An ASO designed to induced exon 23, the exon that encodes W1282X, eliminates the PTC, restores CFTR mRNA stability, and increases production of semi-functional CFTR protein.

[0288] FIG. 26B shows a diagram of ASO target sites on human CFTR exon 23 pre-mRNA. ASOs are shown above the complementary CFTR sequence. The location of the W1282X-CFTR mutation is indicated by the red lettering. The natural and cryptic 5′ splice sites are indicated.

[0289] FIG. 26C shows RT-PCR analysis of exon 23 splicing in W1282X-CFTR expressing immortalized human bronchial epithelial (hBE) cells treated with ASOs (80 μM each). β-actin was analyzed as control. The percent of total CFTR mRNA with exon 23 skipped is shown in Table 7.

[0290] FIG. 26D shows AUC of CFTR-Δ23 conductance was calculated for each treatment (indicated on the X-axis) as the percent ASO-C treated (+SEM; N=2; one-way ANOVA: Sidak's multiple comparison test; * p<. 05); see Table 8 for quantitation.

[0291] FIG. 27A shows that increasing the concentration of each ASO delivered to the cells resulted in increasing exon 23 skipping.

[0292] FIG. 27B shows that increasing the concentration of each ASO delivered to the cells resulted in increasing chloride conductance.

[0293] FIG. 27C shows that the combination of ASO 23-3 and 23-4 eliminate cryptic splicing and induce W1282X-CFTR exon 23 skipping and rescue activity in a dose dependent manner in 16HBEge-W1282X-CFTR cells.

[0294] FIG. 28A shows a schematic of CFTR exon 23 in relation to its position within NBD2 and the position of the CFTR-W1282X mutation. Symmetric exons are in grey.

[0295] FIG. 28B shows a schematic of the CFTR-W1282X and CFTR-Δ23 constructs transfected into FRT cells.

[0296] FIG. 28C shows CFTR-Δ23 function is comparable to CFTR-W1282X and is responsive to CF modulators. Average conductance traces from FRT cells stably transfected with CFTR-Δ23, CFTR-W1282X, or empty vector. Cells were pre-treated with vehicle (DMSO, solid lines), C18 (dotted lines), or VX-445+VX-661 (dashed lines). The time of compound additions (Forskolin, VX-770, or Inh-172) is indicated.

[0297] FIG. 28D shows CFTR-Δ23 function is comparable to CFTR-W1282X and is responsive to CF modulators. Average area under the curve (AUC) was quantified for the forskolin and VX-770 test periods for each construct. Error bars are ±SEM. Two-way ANOVA: Dunnett's multiple comparison test to vehicle within groups. **** p<0.0001. CFTR-Δ23: DMSO and VX-770, N=11; C18, N=6; VX-445+VX-661, N=5. CFTR-W1282X: DMSO and VX-770, N=9; C18, N=5; VX-445+VX-661, N=4, empty vector: DMSO and VX-770, N=8; C18, N=5; VX-445+VX-661, N=3.

[0298] FIG. 28E shows CFTR-Δ23 function is comparable to CFTR-W1282X and is responsive to CF modulators. Immunoblot analysis of CFTR protein, Bands C and B, isolated from in FRT cells stably transfected with empty vector, CFTR-WT, CFTR-W1282X, or CFTR-Δ23 constructs treated with vehicle or C18. β-actin was used as a control for protein expression.

[0299] FIG. 28F shows CFTR-Δ23 function is comparable to CFTR-W1282X and is responsive to CF modulators. Quantification of total CFTR C band from (FIG. 28E), normalized to β-actin. Error bars are ±SEM. Empty vector: N=1, CFTR-WT: N=4, CFTR-W1282X: N=2, CFTR-Δ23: DMSO. N=4: C18N=3.

[0300] FIG. 29A shows a schematic of the CFTR dysfunction caused by the W1282X mutation in exon 23. The c.3846 G>A (W1282X) mutation creates a premature termination codon (PTC) in exon 23 leading to degradation of the transcript via NMD and reducing translation of a semi-functional truncated CFTR protein (indicated by down arrows). ASO induced exon 23 skipping, eliminates the PTC, restores CFTR mRNA stability and increases CFTR expression (indicated by up arrows).

[0301] FIG. 29B shows a diagram of ASO target sites (green lines) on human CFTR exon 23 pre-mRNA. The location of the CFTR-W1282X mutation is indicated by a red vertical line.

[0302] FIG. 29C shows ASOs induce CFTR-W1282X exon 23 skipping (C) RT-PCR analysis of CFTR exon 23 splicing in a CFF16HBEge-W1282X cell line treated with the indicated ASO (10 μM). Exon 23 skipping or cryptic splice site activation was quantified [423 or cryptic/(A23+cryptic+W1282X) x100] and is indicated below each lane.

[0303] FIG. 29D shows a sequence alignment of ASO-23A (SEQ ID NO: 126) and ASO-23B (SEQ ID NO: 125) to exon 23.

[0304] FIG. 29E shows ASOs induce CFTR-W1282X exon 23 skipping. RT-PCR analysis of exon 23 splicing in CFF16HBEge-W1282X cells treated with ASO-23A, ASO-23B, ASO-23A+ASO-23B (ASO-23AB. 10 μM each), or ASO-C(20 μM). Exon 23 skipping or cryptic splice site activation (% of total) was quantified and is indicated below each lane.

[0305] FIG. 29F shows ASOs induce CFTR-W1282X exon 23 skipping. RT-PCR analysis of exon 23 splicing in CFF16HBEge-W1282X cells treated with ASO-23AB, or ASO-C at indicated concentrations. Exon 23 skipping and cryptic splice site activation was quantified and is indicated below each lane. β-actin is a control for RNA expression in all experiments.

[0306] FIG. 30A shows ASO-induced exon skipping increases membrane conductance of a CFTR-W1282X cell line. Conductance (Gt) traces of a CFF16HBEge-W1282X clonal cell line selected for high resistance (CFF16HBEge-W1282X-SCC: 3F2). Cells were transfected with vehicle (black line), ASO-C(grey line), or ASO-23AB (grey lines) at indicated concentrations. Cells were pre-treated with DMSO (solid line) or VX-445+VX-661 (dashed lines).

[0307] FIG. 30B shows ASO-induced exon skipping increases membrane conductance of a CFTR-W1282X cell line. Average area under the curve (AUC) of the conductance trace (FIG. 30A) was quantified for the forskolin+VX-770 test period for each treatment group. Error bars are ±SEM. One-way ANOVA: Dunnett's multiple comparison test to vehicle+DMSO. ** p<0.01. *** p<0.001. N=3 except for 10 UM ASO-23AB where N=2.

[0308] FIG. 30C shows ASO-induced exon skipping increases membrane conductance of a CFTR-W1282X cell line. RT-PCR analysis of exon 23 splicing in CFF16HBEge-W1282X cells in (FIG. 30A). β-actin is a control for RNA expression.

[0309] FIG. 30D shows ASO-induced exon skipping increases membrane conductance of a CFTR-W1282X cell line. Quantification of exon 23 skipping (% of total) in (FIG. 30C). Error bars are ±SEM. One-way ANOVA: Dunnett's multiple comparison test to vehicle. * p<0.05. *** p<0.001. N=3 except for 10 UM ASO-23AB where N=2.

[0310] FIG. 30E shows ASO-induced exon skipping increases membrane conductance of a CFTR-W1282X cell line. The calculated area under the curve, shown in (FIG. 30B) correlated with exon 23 skipping (%), shown in (FIG. 30D) (simple linear regression).

[0311] FIG. 31A shows ASO treatment induces exon 23 skipping, stabilizes CFTR mRNA, and rescues CFTR function in primary human bronchial epithelial (hBE) cells isolated from a patient homozygous for CFTR-W1282X. Equivalent current (leq) traces of primary hBE cells from a homozygous CFTR-W1282X CF donor. Cells were transfected with vehicle, ASO-C, or ASO-23AB (320 μM total) and pre-treated with DMSO, C18, or VX-445+VX-661.

[0312] FIG. 31B shows ASO treatment induces exon 23 skipping, stabilizes CFTR mRNA, and rescues CFTR function in primary human bronchial epithelial (hBE) cells isolated from a patient homozygous for CFTR-W1282X. Average AUC of the current traces (FIG. 31A) was quantified for the forskolin or forskolin+VX-770 test periods for each treatment group. Error bars are ±SEM. Two-way ANOVA: Dunnett's multiple comparison test to DMSO within treatment groups. ####p<0.01. Two-way ANOVA: Dunnett's multiple comparison test to vehicle within treatment groups. **** p<0.0001. N=4 except C18 treatment where N=3.

[0313] FIG. 31C shows ASO treatment induces exon 23 skipping, stabilizes CFTR mRNA, and rescues CFTR function in primary human bronchial epithelial (hBE) cells isolated from a patient homozygous for CFTR-W1282X. RT-PCR analysis of exon 23 splicing in cells from (FIG. 31A). β-actin is a control for RNA expression.

[0314] FIG. 31D shows ASO treatment induces exon 23 skipping, stabilizes CFTR mRNA, and rescues CFTR function in primary human bronchial epithelial (hBE) cells isolated from a patient homozygous for CFTR-W1282X. Quantification of exon 23 skipping in (FIG. 31C). Error bars are +SEM. One-way ANOVA: Dunnett's multiple comparison test. **** p<0.0001. N=4.

[0315] FIG. 31E shows ASO treatment induces exon 23 skipping, stabilizes CFTR mRNA, and rescues CFTR function in primary human bronchial epithelial (hBE) cells isolated from a patient homozygous for CFTR-W1282X. RT-PCR analysis of CFTR mRNA expression (exons 11-14) from cells analyzed in (FIG. 31A) compared to hBE cells from a non-CF donor.

[0316] FIG. 31F shows ASO treatment induces exon 23 skipping, stabilizes CFTR mRNA, and rescues CFTR function in primary human bronchial epithelial (hBE) cells isolated from a patient homozygous for CFTR-W1282X. RT-qPCR analyses of total CFTR mRNA (exon 11-12) from cells analyzed in (FIG. 31A) compared to hBE cells from a non-CF donor. Error bars are ±SEM. One-way ANOVA: Tukey's multiple comparison test, **** p<0.0001. N=4.

[0317] FIG. 31G shows ASO treatment induces exon 23 skipping, stabilizes CFTR mRNA, and rescues CFTR function in primary human bronchial epithelial (hBE) cells isolated from a patient homozygous for CFTR-W1282X. Immunoblot analysis of CFTR protein isolated from cells in (FIG. 31A). Protein from a non-CF donor and a CF donor homozygous for F508del is also shown. SNRPB2 is a loading control.

[0318] FIG. 31H shows ASO treatment induces exon 23 skipping, stabilizes CFTR mRNA, and rescues CFTR function in primary human bronchial epithelial (hBE) cells isolated from a patient homozygous for CFTR-W1282X. Quantification of the Total CFTR (B+C Bands)/SNRP2 normalized to vehicle+DMSO shown in (FIG. 31G). Error bars are ±SEM. One-way ANOVA: Dunnett's multiple comparison test to vehicle+DMSO, *p<0.05. **** p<0.0001. N=3.

[0319] FIG. 32A shows ASO treatment does not affect modulator activity in hBE cells isolated from a CF patient compound heterozygous for CFTR-W1282X and CFTR-F508del. Equivalent current (Ieq) traces of primary hBE cells isolated from a CF donor heterozygous for CFTR-W1282X and CFTR-F508del. Cells were transfected with vehicle, ASO-C, or ASO-23AB (320 UM total). Cells were pre-treated with DMSO, C18, or VX-445+VX-661.

[0320] FIG. 32B shows ASO treatment does not affect modulator activity in hBE cells isolated from a CF patient compound heterozygous for CFTR-W1282X and CFTR-F508del. Average AUC of the current traces (FIG. 32A) was quantified for the forskolin+VX-770 test periods for each treatment group. Error bars are ±SEM. Two-way ANOVA: Dunnett's multiple comparison test to DMSO within treatment groups, #p<0.05. ####p<0.01. Two-way ANOVA: Dunnett's multiple comparison test to vehicle within treatment groups, ns=p>0.05. N=3.

[0321] FIG. 32C shows ASO treatment does not affect modulator activity in hBE cells isolated from a CF patient compound heterozygous for CFTR-W1282X and CFTR-F508del. RT-PCR analysis of exon 23 splicing in hBE CFTR-W1282X/F508del cells in (FIG. 32A). β-actin is a control for RNA expression.

[0322] FIG. 32D shows ASO treatment does not affect modulator activity in hBE cells isolated from a CF patient compound heterozygous for CFTR-W1282X and CFTR-F508del. Quantification of exon 23 skipping in (FIG. 32C). Error bars are ±SEM. One-way ANOVA: Dunnett's multiple comparison test. ** p<0.01. N=3.

[0323] FIG. 32E shows ASO treatment does not affect modulator activity in hBE cells isolated from a CF patient compound heterozygous for CFTR-W1282X and CFTR-F508del. RT-PCR analysis of non-F508del CFTR mRNA expression (exons 11-14) from cells analyzed in (FIG. 32A) compared to hBE cells from a non-CF donor.

[0324] FIG. 32F shows ASO treatment does not affect modulator activity in hBE cells isolated from a CF patient compound heterozygous for CFTR-W1282X and CFTR-F508del. RT-qPCR analyses of total CFTR mRNA from non-F508del alleles (exon 11-12) in cells analyzed in (FIG. 32A) compared to hBE cells from a non-CF donor. Error bars are ±SEM. One-way ANOVA: Tukey's multiple comparison test. **** p<0.0001. N=4, one outlier identified and removed with ROUT outlier analysis (Q=5%) in WT.

[0325] FIG. 32G shows ASO treatment does not affect modulator activity in hBE cells isolated from a CF patient compound heterozygous for CFTR-W1282X and CFTR-F508del. RT-PCR analysis of F508del CFTR mRNA expression (exons 11-14) from cells analyzed in (FIG. 32A) compared to hBE cells from a non-CF donor.

[0326] FIG. 32H shows ASO treatment does not affect modulator activity in hBE cells isolated from a CF patient compound heterozygous for CFTR-W1282X and CFTR-F508del. RT-qPCR analyses of total CFTR mRNA from F508del alleles (exon 11-12) in cells analyzed in (FIG. 32A) compared to hBE cells from a non-CF donor. Error bars are ±SEM. One-way ANOVA: Tukey's multiple comparison test, ns=p>0.05. N=4.

[0327] FIG. 33A shows ASO-induced exon 23 exclusion has partial allele specificity for CFTR-W1282X. RT-qPCR analyses of allele-specific mRNA expression isolated from compound heterozygous hBE cells shown in FIGS. 32F&H. Total CFTR mRNA expression from the CFTR-W1282X allele was normalized to mRNA expression from the F508del allele for each treatment group. Error bars are ±SEM. One-way ANOVA: Tukey's multiple comparison test, *p<0.05. N=2.

[0328] FIG. 33B shows ASO-induced exon 23 exclusion has partial allele specificity for CFTR-W1282X. Allele specific RT-PCR analysis of ASO-induced exon 23 skipping in hBE cells from a donor heterozygous shown in FIG. 32A. Allele specific transcripts were amplified from exons 11-25 (primers: 11WT-25 [W1282X] or 11ΔF-25 [F508del]). Exon 23 skipping from each allele was analyzed using nested exon 22-24 primers. Exon 23 skipping was quantified (% of total) and is shown below each lane.

[0329] FIG. 33C shows ASO-induced exon 23 exclusion has partial allele specificity for CFTR-W1282X. Comparison of calculated SR protein binding sites (ESEfinder, Cold Spring Harbor Laboratory) between WT exon 23 (top) and exon 23 containing the CFTR-W1282X mutation (bottom). Differences are indicated by *.

[0330] FIG. 33D shows ASO-induced exon 23 exclusion has partial allele specificity for CFTR-W1282X. RT-PCR analysis of CFTR exon 23 skipping in hBE cells from various donors treated with vehicle. ASO-C, or ASO-23AB (320 μM). Genotype of each donor is indicated. Exon 23 skipping was quantified and is indicated below each lane. β-actin is a control for RNA expression.

[0331] FIG. 34 shows the potential of ASO treatments to treat CFTR splicing mutations. Analysis of total number of patients with CFTR splicing mutations in the CFTR exons they effect. CFTR exons capable of in-frame skipping are indicated in grey.

[0332] FIG. 35A-35C show that systematic functional analysis of CFTR isoforms lacking symmetrical exons. (FIG. 35A) Schematic of CFTR protein in the cell membrane with protein domains aligned to CFTR exons. Symmetric exons are depicted in green. (FIG. 35B) Quantification of terminating variants found in each CFTR exon from pwCF registered in the CFTR2 database. Green bars represent variants in symmetric exons. (FIG. 35C) Measurement of chloride conductance in cells expressing CFTR or isoforms lacking individual symmetrical exons. Average area under the curve (AUC) was quantified for the forskolin or forskolin+potentiator(s) test periods from conductance traces measured in FRT cells, which lack endogenous CFTR, transfected with empty vector (−), CFTR-F508del. CFTR-WT, or each CFTR exon deletion construct. Cells were pre-treated with vehicle (DMSO), or VX-445+VX-661 (hashed bars) for 24 hours. Potentiators were added after forskolin addition during analysis (VX-770, gray bars, or VX-770+Asp-11, blue bars). Error bars are ±SEM; replicates are DMSO n=4. VX-770 n=3. VX-770+Asp-11 n=1. VX-770+VX-661+VX-445 n=3. VX-770+Asp-11+VX-661+VX-445 n=1 for all except: empty vector n=13.13.7.13.7:45 n=5.3.2.2.2:Δ13 n=7.6.4.6.4: Δ22 n=3.4.3.4.3: Δ23 n=8.9.8.9.8: Δ24 n=5.6.5.6.5: Δ25/26 n=3 (all): ΔF508 n=9.7.7.7.7: WT n=16.16.7.16.7 respectively; two-way ANOVA with Dunnett's multiple comparison test compared to DMSO treatment within groups; ** P<0.01. *** P<0.001, and **** P<0.0001.

[0333] FIG. 36A-36E show that antisense oligonucleotides induce skipping of symmetrical exons. (FIG. 36A) Schematic of ASOs aligned to each CFTR exon targeted for skipping. (FIG. 36B) RT-PCR quantification of exon skipping [A/(full-length+cryptic+A)]*100 for each ASO (15 μM). (FIG. 36C-FIG. 36E) (left) RT-PCR analysis of RNA isolated from T84 cells transfected with vehicle (veh), control ASO (C. 120μM), or ASO-23A+ASO-23B (FIG. 36C) ASO-24-3 (FIG. 36D) or ASO-26-4+ASO-25-2 or ASO-25-EX (FIG. 36E) at indicated doses. (right) The percent of transcripts with exon skipping was plotted in relation to ASO dose.

[0334] FIG. 37A-37D show that ASO treatment induces exon skipping and rescues CFTR function in primary human bronchial epithelial (hBE) cells isolated from pwCF when used with HEMTs. (FIG. 37A) (left) Equivalent current (Ieq) traces of primary hBE cells from CF donors expressing CFTR-W1282X. The genotype of each donor is indicated on the left. Cells were transfected with ASO-C(80 μM, black), or ASO-23AB (40 μM each, green) and treated with vehicle (DMSO, solid lines) or VX-445+VX-661 (dashed lines) for 24 hours before functional analysis. Forskolin, potentiator [VX-770 (diamond) or VX-770+Asp-11 (star)], and bumetanide additions are indicated. (right) Average AUC of the current traces was quantified for the forskolin or forskolin+potentiator(s) test periods for each treatment group. Error bars are ±SEM; two-way ANOVA with Tukey's multiple comparison test within groups to assess ASO effects or Sidak's multiple comparison test between groups to assess ASP-11 effects; * P<0.05. ** P<0.01. *** P<0.001, and **** P<0.0001. (FIG. 37B) (left) RT-PCR analysis of exon 23 splicing in hBE cells indicated to the left. (right) Quantification of the percent of mRNA with exon 23 skipping for each treated donor. Error bars are ±SEM; one-way ANOVA with Tukey's multiple comparisons test; **** P<0.0001. (FIG. 37C) (left) Equivalent current (leq) traces of primary hBE cells from a CF donor compound heterozygous for CFTR-N1303K and CFTR-F508del. Cells were transfected with ASO-C(40-160 μM, black), or ASO-24-3 (40-160 μM, blue) and treated as in FIG. 37A. (right) Average AUC of the current trace was quantified for the forskolin or forskolin+potentiator(s) test periods for each treatment group. Error bars are ±SEM; two-way ANOVA with Tukey's multiple comparisons test within groups to assess ASO effects or Šídák's multiple comparison test between groups to assess ASP-11 effects; * P<0.05 and *** P<0.001. (FIG. 37D) (left) RT-PCR analysis of exon 24 splicing in hBE cells. (right) Quantification of exon 24 skipping. Error bars are ±SEM; one-way ANOVA with Tukey's multiple comparisons test: **** P<0.0001.

[0335] FIG. 38A-38C show that an ASO cocktail induces multi-exon skipping of CFTR exons 25 and 26 in primary human bronchial epithelial (hBE) cells isolated from pwCF. (FIG. 38A) (left) Equivalent current (leq) traces of primary hBE cells from a CF donor compound heterozygous for CFTR-F508del and CFTR-E1371X. Cells were transfected with ASO-C(40-240 M, black), ASO-25 (40-120 μM, pink), or ASO-25+ASO-26 (40-120 μM each, purple) and treated with vehicle (DMSO, solid lines) or VX-445+VX-661 (dashed lines) for 24 hours. Forskolin, potentiator [VX-770 (diamond) or VX-770+ASP-11 (star)], and bumetanide additions are indicated. (right) Average AUC of the current traces was quantified for the forskolin or forskolin+potentiator(s) test periods for each treatment group. Error bars are ±SEM two-way ANOVA with Tukey's multiple comparison test within groups to assess ASO effects or Šídák's multiple comparison test between groups to assess ASP-11 effects; * P<0.05. ** P<0.01. *** P<0.001, and **** P<0.0001. (FIG. 38B) (left) RT-PCR analysis of exon 25 or exon 25/26 splicing in hBE cells from A (right) Quantification of exon 25 or 25/26 skipping. Error bars are +SEM; two-way ANOVA with Tukey's multiple comparisons test ** P<0.01. *** P<0.001, and **** P<0.0001. (FIG. 38C) RT-qPCR analyses of total (left) CFTR-E1371X mRNA (exon 11-12) or (right) CFTR-F508del mRNA (exon 11-12) from treated hBE cells compared to RNA from a non-CF or homozygous CFTR-F508del donor. Error bars are ±SEM; one-way ANOVA with Dunnet's multiple comparisons test to ASO-C; ** P<0.01 and **** P<0.0001.

[0336] FIG. 39A and FIG. 39B show that ASO treatment induces exon 22 skipping but does not rescue CFTR function in primary human bronchial epithelial (hBE) cells isolated from a CF individual expressing terminating variants. (FIG. 39A) (left) Equivalent current (Ieq) traces of primary hBE cells from CF donors expressing at least one nonsense variant in exon 22. The genotype of each donor is indicated at the left. Cells were transfected with ASO-C(40-160 μM, black), or ASO-22-1 (40-160 μM, orange) and treated with vehicle (DMSO, solid lines) or VX-445+VX-661 (dashed lines) for 24 hours. Forskolin, potentiator [VX-770 (diamond) or VX-770+Asp-11 (star)], and bumetanide additions are indicated. (right) Average AUC of the current traces was quantified for the forskolin or forskolin+potentiator(s) test periods for each treatment group. Error bars are ±SEM; within groups to assess ASO effects or Šídák's multiple comparison test between groups to assess ASP-11 effects; *P<0.05. (FIG. 39B) (left) RT-PCR analysis of exon 22 splicing from cells in FIG. 39A. (right) Quantification of exon 22 skipping. Error bars are ±SEM; one-way ANOVA with Tukey's multiple comparisons test; * P<0.05 and *** P<0.001.

[0337] FIG. 40A and FIG. 40B show that expression of CFTR exon deletion constructs. (FIG. 40A) RT-PCR analysis of CFTR RNA collected from FRT cells transfected with each CFTR exon deletion construct, compared to CFTR-WT. (FIG. 40B) (top) Immunoblot analysis of CFTR protein, bands C and B, isolated from FRT cells stably transfected with empty vector. CFTR-F508del, CFTR-WT, or each CFTR exon deletion construct. Cells were treated with DMSO or VX-445+VX-661. β-actin was used as a loading control. (middle) Total CFTR protein (band C+band B/β-actin was quantified. (bottom) The ratio of CFTR (band C/band B) isoforms was quantified. Replicates are n=2 and experimental groups are connected by a line.

[0338] FIG. 40C shows a representative current traces of CFTR constructs analyzed in FIG. 1C.

[0339] FIG. 41 shows the cellular localization of CFTR and the exon skipped isoforms. Immunofluorescent images of FRT cells transfected with empty vector, CFTR-WT. CFTR-F508del. CFTR-A22. CFTR-Δ23. CFTR-424, or CFTR-425/26. Cells were incubated with a CFTR-specific monoclonal antibody (green) and a rabbit Claudin polyclonal antibody (magenta). Regions of interest at the cell membrane were enlarged to show co-localization of CFTR at the cell membrane (white).

[0340] FIG. 42A and FIG. 42B show spliced-switching ASOs induce skipping of symmetrical CFTR exons. (FIG. 42A) RT-PCR analysis of T84 cells transfected with vehicle, control ASO (ASO-C), or CFTR exon targeting ASOs. Amplicons representing cryptically spliced CFTR is indicated by * and expected exon skipping for each ASO is labelled with A on the right side of the gel. Quantification of gels are shown in FIG. 36B. ASOs that induced the highest level of skipping are highlighted in green. (FIG. 42B) RT-PCR analysis of T84 cells transfected with vehicle, control ASO (ASO-C), or CFTR exon 25 and 26 targeting ASOs. Exon skipping is quantified as [A/(full-length+4) |*100.

[0341] FIG. 43A and FIG. 43B show that ASO treatment induces CFTR-W1282X exon skipping but does not increase function above approved HEMTs when expressed with CFTR-F508del (FIG. 43A) (left) Equivalent current (Ieq) traces of primary hBE cells from CF donors. The genotype of each donor is indicated on the left. Cells were transfected with ASO-C(80 μM, black), or ASO-23AB (40 μM each, green) and treated with vehicle (DMSO, solid lines) or VX-445+VX-661 (dashed lines) for 24 hours. Forskolin, potentiator [VX-770 (diamond) or VX-770+Asp-11 (star)], and bumetanide additions are indicated. (right) Average AUC of the current traces was quantified for the forskolin or forskolin+potentiator(s) test periods for each treatment group. Error bars are ±SEM two-way ANOVA with Tukey's multiple comparison within groups to assess ASO effects or Sidák's multiple comparison test between groups to assess ASP-11 effects; * P<0.05. ** P<0.01. (FIG. 43B) (left) RT-PCR analysis of exon 23 splicing in hBE cells from A. (right) Quantification of percent exon 23 skipping for each treated donor. Error bars are ±SEM; one-way ANOVA with Tukey's multiple comparisons test: *P<0.05. ** P<0.01. **** P<0.0001.

[0342] Skilled artisans will appreciate that elements in the figures are illustrated for simplicity and clarity and have not necessarily been drawn to scale. For example, the dimensions of some of the elements in the figures can be exaggerated relative to other elements to help improve understanding of the embodiment(s) of the present disclosure.

### DETAILED DESCRIPTION OF THE DISCLOSURE

[0343] The present disclosure relates to general compounds and methods to treat cystic fibrosis in subjects using antisense oligonucleotides (ASOs) that induce specific pre-mRNA splicing events in CFTR gene transcripts that result in mRNAs that code for proteins that fully or partially restore the function of CFTR (i.e., resulting in increased levels of correctly localized CFTR protein at the plasma membrane and with increased function). Frameshift and nonsense mutations pose a major problem for disease therapeutic development. For example, some ASOs can base-pair with the target RNA and correct aberrant splicing caused by mutations, and other ASOs can induce skipping of exons with mutations that cause open reading frame-shifts. In such instances, skipping of the mutated exon using ASOs can restore the reading frame and generate an mRNA that codes for a CFTR isoform with partial function. Eliminating these mutations from the mRNA by inducing exon skipping is a relatively unexplored treatment approach, though it has shown promise for some diseases. As shown herein, elimination of a common stop mutation associated with cystic fibrosis by inducing skipping of the exon it is located in, results in a restoration of the open reading frame and recovers CFTR protein function in a manner expected to be therapeutic in CF patients who don't currently have effective treatment options. These results are an important advancement for the cystic fibrosis community but also have implications for other diseases where terminating mutations are responsible for dysfunction.

[0344] The CFTR gene encodes a member of the ATP-binding cassette (ABC) transporter superfamily. ABC proteins transport various molecules across extra—and intra-cellular membranes. ABC genes are divided into seven distinct subfamilies (ABC1, MDR/TAP, MRP, ALD, OABP, GCN20, White). The CFTR protein is a member of the MRP subfamily that is involved in multi-drug resistance. The encoded protein functions as a chloride channel and controls the regulation of other transport pathways. Mutations in the CFTR gene are associated with the autosomal recessive disorders cystic fibrosis and congenital bilateral aplasia of the vas deferens. Alternatively spliced transcript variants have been described, many of which result from mutations in this gene.

[0345] Human (Homo sapiens) cystic fibrosis transmembrane conductance regulator is located on chromosome 7:117,465,784-117,715,971 (forward strand; SEQ ID NO: 130). The gene is 6132 bp mRNA (Gene ID: 1080; Official Symbol: CFTR; Official Full Name: cystic fibrosis transmembrane conductance regulator) and is assigned NCBI Reference Sequence: NM_000492.3 (SEQ ID NO: 145); ACCESSION: NM_000492; Ensembl: ENSG00000001626; HPRD: 03883; MIM: 602421; and Vega: OTTHUMG00000023076. CFTR is also known as: CF; MRP7; ABC35; ABCC7; CFTR/MRP; TNR-CFTR; dJ760C5.1. Human CFTR protein is assigned NCBI Reference Sequence: NP_000483.3 (1480 aa; SEQ ID NO: 146).

[0346] The mouse (Mus musculus) cystic fibrosis transmembrane conductance regulator is located on chromosome 6:18170687-18322768 (SEQ ID NO: 147). The mouse CFTR gene is 6305 bp (Gene ID: 12638; Official Symbol: Cftr; Official Full Name: cystic fibrosis transmembrane conductance regulator), and is also known as: Abcc7; AW495489; ATP-binding cassette sub-family C member 7; ATP-binding cassette transporter sub-family C member 7; ATP-binding cassette, subfamily c, member 7; cAMP-dependent chloride channel; channel conductance-controlling ATPase; cystic fibrosis transmembrane conductance regulator homolog cystic fibrosis transmembrane conductance regulator homolog; ATP-binding cassette, subfamily c, member 7. The mouse CFTR gene has been assigned NCBI Reference Sequence: NM_021050.2 (SEQ ID NO: 148), and Ensembl: ENSMUSG00000041301. The mouse CFTR protein is assigned NCBI Reference Sequence: NP_066388.1 (1476 aa; SEQ ID NO: 149).

[0347] Antisense compounds, (e.g. antisense oligonucleotides (ASOs)) have been used to modulate target nucleic acids. Antisense compounds comprising a variety of chemical modifications and motifs have been reported. In certain instances, such compounds are useful as research tools, diagnostic reagents, and as therapeutic agents. In certain instances, antisense compounds have been shown to modulate protein expression by binding to a target messenger RNA (mRNA) encoding the protein. In certain instances, such binding of an antisense compound to its target mRNA results in cleavage of the mRNA. Antisense compounds that modulate processing of a pre-mRNA have also been reported. Such antisense compounds alter splicing, interfere with polyadenlyation or prevent formation of the 5′-cap of a pre-mRNA.

[0348] Pre-mRNA splicing involves the precise and accurate removal of introns from the pre-messenger RNA and the ligation of exons together after intron removal to generate the mature mRNA which serves as the template for protein translation. Pre-mRNA splicing is a two-step reaction carried out by a spliceosome complex comprising protein and small RNA components which recognize conserved sequence elements within the introns and exons of the RNA. Recognition of these sequence elements, including the 5′ splice site, 3′ splice site and branch point sequence, is the primary mechanism directing the correct removal of introns.

[0349] Splicing requires direct base-pairing between small nuclear RNA (snRNA) components of the spliceosome and the splice site nucleotides of the mRNA. This interaction can be easily disrupted by gene mutations or by artificial blocking using short oligonucleotides complementary to the RNA. Such so called antisense oligonucleotides (ASOs), when designed to be complementary to a splice sites, will compete for base-pairing with the snRNAs, thereby blocking an essential step in splicing at the site. In this way, antisense oligonucleotides can potently block unwanted splicing or redirect splicing to alternative splice sites, and can result in mRNAs that code for proteins that fully or partially restore the function to target transcripts.

[0350] For example, ASOs can target the 2789+5G>A mutation in intron 16 of the CFTR gene that causes cystic fibrosis. This mutation has been observed in 521 patients with cystic fibrosis. Because aberrant splicing of exon 16 due to the mutation is the cause of cystic fibrosis in patients with this mutation, improving splicing using antisense oligonucleotides to interfere with the deleterious effects of the mutation, can have a therapeutic benefit to the patients. In a non-limiting example, an antisense oligonucleotide that targets the 2789+5G>A mutation of the CFTR gene that causes cystic fibrosis can be SEQ ID NO: 97.

[0351] In another non-limiting example, antisense oligonucleotides can target the 3849+10kbC->T mutation in intron 19 of the CFTR gene. This mutation has been observed in 496 patients, and in 1.100 patients in CFTR2 database. The 3849+10kbC>T mutation creates a cryptic splice site that results in an aberrant mRNA that does not produce CFTR protein and antisense oligonucleotides targeted to the region of intron 19 surrounding and encompassing this mutation can potentially block splicing to this cryptic splice site. In a non-limiting example, an antisense oligonucleotide that targets the 3849+10kbC>T mutation of the CFTR gene that causes cystic fibrosis can be SEQ ID NO:150.

[0352] In yet another non-limiting example, antisense oligonucleotides can target the 3272-26A->G mutation of the CFTR gene that causes cystic fibrosis. This mutation is found in 186 patients. The 3272-26A>G mutation creates a cryptic splice site that results in an aberrant mRNA that does not produce CFTR protein. Antisense oligonucleotides targeted to the region of surrounding and encompassing this mutation can potentially block splicing to this cryptic splice site. In a non-limiting example, an antisense oligonucleotide that targets the 3272-26A->G mutation of the CFTR gene that causes cystic fibrosis can be SEQ ID NO: 114.

[0353] In another non-limiting example, antisense oligonucleotides can target exon skipping in exons that have nonsense mutations. For example, skipping of exon 4, exon 23, exon 24, exon 25, or exon 26 all can result in an mRNA transcript that is in-frame so that translation will continue to the natural stop-codon (i.e., mutations such as CFTR 621+1G>T and CFTR 406G>T). Exons 4, 23, 24, 25 and 26 have a number of different patient nonsense mutations that cause cystic fibrosis and any of these can be treated by ASOs that induce exon skipping of the exons that house nonsense mutations to correct the reading frame and allow translation through to the natural termination codon.

[0354] In yet other non-limiting examples, 70-90% of all Cystic fibrosis (CF) patients have a mutation in exon 11 (deltaF508) which can be targeted by ASO 11-6 (SEQ ID NO.: 91). Five percent of CF patients have a splice site mutation in intron 16 which can be targeted and corrected by ASO 16-8 (SEQ ID NO.: 102); 2.8% of CF patients have a nonsense mutation in exon 23 which can be targeted for skipping and frame-shift correction using ASO 23-4 (SEQ ID NO.: 126) and ASO-23-3 (SEQ ID NO.: 125); 0.33% of CF patients have a nonsense mutation in exon 24 which can be targeted for skipping and frame-shift correction using ASO 24-1, 24-2, 24-3 (SEQ ID NO.: 127, 128, 129; respectively); CF mutation databases indicate that nonsense and splicing mutations in and around exon 4 are common and can be targeted for gene expression correction either by splicing redirection or frame-shift correction using ASO 4-1 (SEQ ID NO.: 65); and CF causing nonsense mutations in exons 2, 5, 7, 9, 10, 13, 20 and 22 are also commonly annotated in the Human Gene Mutation Database and can be targeted by ASOs 2-4, 5-1,7-4, 9-1, 11-6, 13-1, 15-1, 20-2, 22-1 (SEQ ID NO.: 64, 71, 76, 78, 91, 92, 94, 111, 116; respectively). Around 0.21% of CF patients have a terminating mutation in exons 25 and 26 and can be targeted for correction via exon skipping, including the E1373X mutation, for example by ASO-25-EX (SEQ ID NO.: 177) or ASO-25-2 (SEQ ID NO.: 175) in combination with ASO-26-4 (SEQ ID NO.: 181).

[0355] In certain embodiments, this disclosure provides ASOs and the use of them in combination, such that one ASO blocks splicing of exon 25 (e.g. SEQ ID Nos: 174-177) and another ASO blocks splicing of exon 26 (e.g. SEQ ID Nos: 178-181). The ASOs together, when used in combination, result in exon 25 and 26 skipping, which results in a CFTR mRNA spliced isoform that is in the same open reading frame as the full-length CFTR-encoding mRNA. This CFTR delta-exon 25/26 isoform encodes a CFTR protein with partial function. Treatment of cystic fibrosis cells with mutations in either exon 25 or exon 26 with two separate ASOs can result in removal of the mutation from the mRNA, stabilization of the mRNA, and production of a therapeutic CFTR protein isoform. In addition, treatment with either ASO alone can induce only skipping of exon 25 or exon 26, which, when used in cells with a CFTR mutation in the respective targeted exon, can stabilize the mRNA and thereby increase CFTR protein production.

[0356] Additionally, CFTR gene mutations that introduce premature termination codons account for ˜10% of cystic fibrosis cases. This mutation type is associated with a severe form of the disease, typically a consequence of low CFTR mRNA levels resulting from degradation by nonsense mediated mRNA decay (NMD), and production of a truncated, non-functional CFTR protein. Current therapeutics for CF are less effective in patients with these types of mutations, likely due to the instability of the mRNA and lack of the natural C-terminal portion of the protein. Antisense technology is a promising therapeutic strategy for these types of mutations that has not been widely explored for the disease. Splice-switching antisense oligonucleotides (ASOs) can be designed to modify gene expression by directly modulating pre-mRNA splicing. ASO-mediated skipping of exons to restore the open reading frame of RNA with frameshift mutations or premature termination codons (PTC) has been successfully applied to treat a number of disorders. This approach of treating disease associated with PTCs eliminates the PTC by inducing skipping of the exon encoding the variant and results in retention of the proper reading frame.

[0357] In one aspect, one or more modified oligonucleotides that are complementary to an equal-length portion of a target region of a cystic fibrosis transmembrane conductance regulator (CFTR) transcript can be used to treat CFRT. In certain embodiments, the one or more oligonucleotides bind a target region that is about 25 nucleobases upstream and/or about 25 downstream of the exon to be skipped. In some embodiments, the targeted exon is exon 2, exon 4, exon 5, exon 7, exon 9, exon 10, exon 11, exon 13, exon 15, exon 16, exon 20, exon 22, intron 22, exon 23, exon 24, exon 25, or exon 26 of human CFTR. In certain embodiments, the two or more oligonucleotides bind a target region is within: (a) nucleobase 198,888 and nucleobase 199,094 of SEQ ID NO: 130; or (b) nucleobase 199,705 and nucleobase 199,796 of SEQ ID NO: 130. In some embodiments, the target region is within nucleobase 198,888 and nucleobase 199,094 of SEQ ID NO: 130, and each of the two or more modified oligonucleotides is selected from the group consisting of SEQ ID NOs: 174-177. In some embodiments, the target region is within nucleobase 199,705 and nucleobase 199.796 of SEQ ID NO: 130, and each of the two or more modified oligonucleotides is selected from the group consisting of SEQ ID NOS: 178-181.

[0358] For example, ASOs can target the W1282X mutation (the 5th most common mutation in CFTR) in exon 23 of the CFTR gene that causes cystic fibrosis. This nonsense mutation truncates CFTR at amino acid 1281 (CFTR1281), removing ˜60% of the nucleotide binding domain 2 (NBD2) but retaining most of the full-length protein (1281 vs 1480 amino acids). The truncated protein may have processing and/or gating defects as an increase in channel function can be achieved in W1282X-CFTR cells by potentiator and corrector treatment. Stabilizing W1282X-CFTR by elimination of the PTC using an ASO that induces the exclusion of exon 23 during the process of pre-mRNA splicing is a potential approach. Skipping of exon 23 results in the production of a CFTR mRNA with an intact open-reading frame with a deletion of the 52 amino acids encoded by exon 23. In a non-limiting example, two or more antisense oligonucleotides that target splicing of exon 23 can be used to treat CFTR patients with the W1282X mutation. In another non-limiting example, antisense oligonucleotides that target splicing of exon 23 can be SEQ ID NO:123-126.

[0359] In certain embodiments, the ASO compositions disclosed herein are used to treat CFTR patients with one or more Class I mutations. Class I mutations result in the presence of premature termination codons (PTCs). These “stop” codons do not allow the CFTR protein to be produced, leading to an absence of CFTR protein at the epithelial membrane. In some embodiments, CFTR mutations suitable for treatment with the ASO compositions disclosed herein comprise one or more of W1282X, L1254X, S1255X, L1258FfsX7, R1283M, 11295FfsX, S1297FfsX, G1298WfsX, N1303TfsX, Q1313X, E92X, Q98X, R104EfsX, 1105SfsX, Y109GfsX, Y122X, 1148LfsX, F157X, G542X, N1303K, R553X, 621+1G>T, 1717-1G>A, 1507del, R1162X, or E831X, K1250RfsX9, 3856delC. L1243X, G1247X, S1248X, 3876delA, 3878delG, 3886insA, 3889dupT, 3892delTT. 3898insC, 3905delT, 3905insT, L1253X, E1266X, 3940delG, 3944delGT, W1274X, 3959delC, 3960-3961delA, 3967deITT, Q1280X, Q1281X, G1287X, Q1291X, 4006delA, c.3883_3884insG, 4010del4, 4015delA, c.3889delT, 4016insT, 4022insT, c.3893delG, K1302X, 4040delA, 4040dupA, 4048insCC, Y1307X, E1308X, Q1309X, W1310X, 4064-4065delinsAATATG, Q1313X, W1316X, 4089ins4, 4089delA, 4108delT, 4120delCA, Q1330X, c.3999delG, c.4028delG, 4160insG, 4165dclGT, p.S1347PfsX13, 4168delCTAAGCC, c.4036dupC, 4168delCTAAG, 4172delGC, 4177delG. K1351X. 4197_4198delCT, 4203TAG->AA. 4209TGTT->AA, c.4078delG. 4218insT. 4222delG. 4237-4242delinsAGAA. E1371X. 4259dcl5, 4271dclC. Y1381X. Q1382X. 4279insA, c.4163_4167delTAAAA, Q1390X. 4301dclA, c.4187delC. 4326delTC. 4332delTG, C1400X. E1401X, E1409X. C1410X, Q1411X, and Q1412X.

TABLE S1
Total CF-causing PTC variants in CFTR exons 23-26 reported in CFTR2. For each variant,
the total number of alleles is indicated as well as the total number of homozygous, compound
heterozygous with F508del, and compound heterozygous with non-F508del genotypes.

| exon | Variant legacy name | cDNA | alleles | homozygous | F508del | other |
|---|---|---|---|---|---|---|
| 23 | 3856delC | c.3724del | 1 | 0 | 1 | 0 |
| | L1243X | c.3728T > A | 1 | 0 | 0 | 1 |
| | G1247X | c.3739G > T | 2 | 0 | 0 | 2 |
| | S1248X | c.3743C > A \| c.3743C > G | 5 | 0 | 3 | 2 |
| | 3876delA | c.3744del | 172 | 18 | 65 | 71 |
| | 3878delG | c.3747del | 20 | 1 | 11 | 7 |
| | 3886insA | c.3754dup | 1 | 0 | 1 | 0 |
| | 3889dupT | c.3758dup | 1 | 0 | 1 | 0 |
| | 3892delTT | c.3760_3761del | 1 | 0 | 0 | 1 |
| | L1254X | c.3761T > A \| c.3761T > G | 35 | 0 | 29 | 6 |
| | S1255X | c.3764C > A | 40 | 2 | 12 | 24 |
| | 3898insC | c.3767dup | 1 | 0 | 1 | 0 |
| | 3905delT | c.3773del | 1 | 0 | 1 | 0 |
| | 3905insT | c.3773dup | 330 | 4 | 221 | 101 |
| | L1253X | c.3773T > A | 1 | 0 | 0 | 1 |
| | E1266X | c.3796G > T | 3 | 0 | 1 | 2 |
| | 3940delG | c.3808del | 4 | 0 | 1 | 3 |
| | 3944delGT | c.3816_3817del | 26 | 0 | 14 | 12 |
| | W1274X | c.3822G > A | 8 | 0 | 7 | 1 |
| | 3959delC | c.3827del | 1 | 0 | 1 | 0 |
| | 3960-3961delA | c.3829del | 1 | 0 | 0 | 1 |
| | 3967delTT | c.3835_3836del | 2 | 0 | 2 | 0 |
| | Q1280X | c.3838C > T | 3 | 0 | 2 | 1 |
| | Q1281X | c.3841C > T | 6 | 0 | 2 | 4 |
| | W1282X | c.3845G > A \| c.3846G > A | 2500 | 238 | 1079 | 945 |
| | G1287X | c.3859G > T | 2 | 0 | 0 | 2 |
| | Q1291X | c.3871C > T | 5 | 1 | 2 | 1 |
| | W1282X; R1283M | c.[3846G > A; 3848G > T] | 7 | 0 | 6 | 1 |
| 24 | 4006delA | c.3876del | 1 | 0 | 0 | 1 |
| | c.3883_3884insG | c.3883_3884insG | 4 | 2 | 0 | 0 |
| | 4010del4 | c.3883_3886del | 18 | 2 | 5 | 9 |
| | 4015delA | c.3883del | 36 | 0 | 17 | 19 |
| | c.3889delT | c.3889del | 1 | 0 | 0 | 1 |
| | 4016insT | c.3889dup | 156 | 4 | 75 | 73 |
| | 4022insT | c.3891dup | 11 | 0 | 7 | 4 |
| | c.3893delG | c.3893del | 1 | 0 | 1 | 0 |
| | K1302X | c.3904A > T | 4 | 1 | 0 | 2 |
| | 4040delA | c.3908del | 31 | 0 | 17 | 14 |
| | 4040dupA | c.3908dup | 2 | 0 | 1 | 1 |
| | 4048insCC | c.3917_3918dup | 1 | 0 | 0 | 1 |
| | Y1307X | c.3921T > A | 2 | 0 | 0 | 2 |
| | E1308X | c.3922G > T | 4 | 0 | 2 | 2 |
| | Q1309X | c.3925C > T | 4 | 0 | 1 | 3 |
| | W1310X | c.3929G > A \| c.3930G > A | 30 | 2 | 17 | 9 |
| | 4064- | c.3932_3933delinsAATATG | 2 | 0 | 1 | 1 |
| | 4065delinsAATATG | | | | | |
| | Q1313X | c.3937C > T | 50 | 1 | 30 | 18 |
| | W1316X | c.3947G > A | 2 | 0 | 1 | 1 |
| | 4089ins4 | c.3957_3958insAGGG | 1 | 0 | 1 | 0 |
| | 4089delA | c.3957del | 1 | 0 | 1 | 0 |
| 25 | 4108delT | c.3976del | 2 | 0 | 2 | 0 |
| | 4120delCA | c.3988_3989del | 1 | 0 | 1 | 0 |
| | Q1330X | c.3988C > T | 10 | 0 | 7 | 3 |
| | c.3999delG | c.3999del | 1 | 0 | 1 | 0 |
| | c.4028delG | c.4028del | 2 | 0 | 2 | 0 |
| | 4160insG | c.4028dup | 2 | 0 | 1 | 1 |
| | 4165delGT | c.4033_4034del | 1 | 0 | 0 | 1 |
| | p.S1347PfsX13 | c.4035_4038dup | 7 | 1 | 5 | 0 |
| | 4168delCTAAGCC | c.4036_4042del | 3 | 0 | 3 | 0 |
| | c.4036dupC | c.4036dup | 1 | 0 | 1 | 0 |
| | 4168delCTAAG | c.4037_4041del | 1 | 0 | 0 | 1 |
| | 4172delGC | c.4040_4041del | 1 | 0 | 0 | 1 |
| | 4177delG | c.4046del | 2 | 0 | 1 | 1 |
| | K1351X | c.4051A > T | 1 | 0 | 1 | 0 |
| | 4197_4198delCT | c.4065_4066del | 1 | 0 | 0 | 1 |
| | 4203TAG -> AA | c.4071_4073delinsAA | 1 | 0 | 1 | 0 |
| | 4209TGTT -> AA | c.4077_4080delinsAA | 49 | 1 | 35 | 12 |
| | c.4078delG | c.4078del | 1 | 0 | 0 | 1 |
| | 4218insT | c.4086dup | 9 | 0 | 5 | 4 |
| | 4222delG | c.4090del | 2 | 0 | 2 | 0 |
| | 4237- | c.4105_4110delinsAGAA | 1 | 0 | 1 | 0 |
| | 4242delinsAGAA | | | | | |
| | E1371X | c.4111G > T | 28 | 0 | 16 | 12 |
| | 4259de15 | c.4127_4131del | 5 | 0 | 1 | 4 |
| 26 | 4271delC | c.4139del | 4 | 0 | 4 | 0 |
| | Y1381X | c.4143C > A \| c.4143C > G | 2 | 0 | 1 | 1 |
| | Q1382X | c.4144C > T | 12 | 0 | 8 | 4 |
| | 4279insA | c.4147dup | 6 | 0 | 5 | 1 |
| | c.4163_4167delTAAAA | c.4163_4167del | 1 | 0 | 1 | 0 |
| | Q1390X | c.4168C > T | 3 | 1 | 1 | 0 |
| | 4301delA | c.4170del | 1 | 0 | 1 | 0 |
| | c.4187delC | c.4187del | 1 | 0 | 0 | 1 |
| | 4326delTC | c.4197_4198del | 32 | 0 | 21 | 11 |
| | 4332delTG | c.4200_4201del | 2 | 0 | 0 | 2 |
| | C1400X | c.4200T > A | 1 | 0 | 1 | 0 |
| | E1401X | c.4201G > T | 2 | 0 | 0 | 2 |
| | E1409X | c.4225G > T | 1 | 0 | 1 | 0 |
| | C1410X | c.4230C > A | 1 | 0 | 0 | 1 |
| | Q1411X | c.4231C > T | 18 | 3 | 7 | 5 |
| | Q1412X | c.4234C > T | 12 | 0 | 5 | 7 |
| total | | | 3773 | 282 | 1782 | 1427 |

[0360] In certain embodiments, the ASO compositions disclosed herein are used to treat CFTR patients with one or more mutations to the CFTR gene. In some embodiments, CFTR mutations suitable for treatment with the ASO compositions disclosed herein comprise one or more of E56K, P67L, R74W, D110E, D110H, R117C, R117H, G178R, E193K, L206W, R347H, R352Q, A455E, S549N, S549R, G551D, G551S, D570G, D579G, S945L, S977F, F1052V, K1060T, A1067T, G1069R, R1070Q, R1070W, F1074L, D1152H, G1244E, S1251N, S1255P, D1270N, G1349D, G85E, D1152H, R334W, R560T, L206W, P67L, M1101K, M470V, L997F, F508del, 711+3A>G, 2789+5G>A, 3272-26A>G, and 3849+10kbC>T.

[0361] In some embodiments, CFTR mutations suitable for treatment with the ASO compositions disclosed herein comprise one or more of 3856delC, L1243X, G1247X, S1248X, 3876delA, 3878delG, 3886insA, 3889dupT, 3892delTT, 3898insC, 3905delT, 3905insT, L1253X, E1266X, 3940delG, 3944delGT, W1274X, 3959delC, 3960-3961delA, 3967deITT, Q1280X, Q1281X, G1287X, and Q1291X.

[0362] In some embodiments, CFTR mutations suitable for treatment with the ASO compositions disclosed herein comprise one or more of 4006delA, c.3883_3884insG, 4010del4, 4015delA, c.3889delT, 4016insT, 4022insT, c.3893delG, K1302X, 4040delA, 4040dupA, 4048insCC, Y1307X, E1308X, Q1309X, W1310X, 4064-4065delinsAATATG, Q1313X, W1316X, 4089ins4, and 4089delA.

[0363] In some embodiments, CFTR mutations suitable for treatment with the ASO compositions disclosed herein comprise one or more of 4108delT, 4120delCA, Q1330X, c.3999delG, c.4028delG, 4160insG, 4165delGT, p.S1347PfsX13, 4168delCTAAGCC, c.4036dupC, 4168delCTAAG, 4172delGC, 4177delG, K1351X, 4197_4198delCT, 4203TAG->AA, 4209TGTT->AA, c.4078delG, 4218insT, 4222delG, 4237-4242delinsAGAA, E1371X, and 4259del5.

[0364] In some embodiments, CFTR mutations suitable for treatment with the ASO compositions disclosed herein comprise one or more of 4271delC, Y1381X, Q1382X, 4279insA, c.4163_4167delTAAAA, Q1390X, 4301delA, c.4187delC, 4326delTC, 4332delTG, C1400X, E1401X, E1409X, C1410X, Q1411X, and Q1412X.

[0365] As used herein, “nucleoside” means a compound comprising a nucleobase moiety and a sugar moiety. Nucleosides include, but are not limited to, naturally occurring nucleosides (as found in DNA and RNA) and modified nucleosides. Nucleosides may be linked to a phosphate moiety.

[0366] As used herein, “antisense compound” or “antisense oligonucleotide (ASO)” means a compound comprising or consisting of an oligonucleotide at least a portion of which is complementary to a target nucleic acid to which it is capable of hybridizing, resulting in at least one antisense activity.

[0367] As used herein, “antisense activity” means any detectable and/or measurable change attributable to the hybridization of an antisense compound to its target nucleic acid. As used herein, “detecting” or “measuring” means that a test or assay for detecting or measuring is performed. Such detection and/or measuring may result in a value of zero. Thus, if a test for detection or measuring results in a finding of no activity (activity of zero), the step of detecting or measuring the activity has nevertheless been performed.

[0368] As used herein, “chemical modification” means a chemical difference in a compound when compared to a naturally occurring counterpart. In reference to an oligonucleotide, chemical modification does not include differences only in nucleobase sequence. Chemical modifications of oligonucleotides include nucleoside modifications (including sugar moiety modifications and nucleobase modifications) and internucleoside linkage modifications.

[0369] As used herein, “sugar moiety” means a naturally occurring sugar moiety or a modified sugar moiety of a nucleoside.

[0370] As used herein, “modified sugar moiety” means a substituted sugar moiety, a bicyclic or tricyclic sugar moiety, or a sugar surrogate.

[0371] As used herein, “substituted sugar moiety” means a furanosyl comprising at least one substituent group that differs from that of a naturally occurring sugar moiety. Substituted sugar moieties include, but are not limited to, furanosyls comprising substituents at the 2′-position, the 3′-position, the 5′-position and/or the 4′-position.

[0372] As used herein, “2′-substituted sugar moiety” means a furanosyl comprising a substituent at the 2′-position other than —H or —OH. Unless otherwise indicated, a 2′-substituted sugar moiety is not a bicyclic sugar moiety (i.e., the 2′-substituent of a 2′-substituted sugar moiety does not form a bridge to another atom of the furanosyl ring).

[0373] As used herein, “MOE” means —OCH₂CH₂OCH₃.

[0374] As used herein, “bicyclic sugar moiety” means a modified sugar moiety comprising a 4 to 7 membered ring (including but not limited to a furanosyl) comprising a bridge connecting two atoms of the 4 to 7 membered ring to form a second ring, resulting in a bicyclic structure. In certain embodiments, the 4 to 7 membered ring is a sugar ring. In certain embodiments, the 4 to 7 membered ring is a furanosyl. In certain such embodiments, the bridge connects the 2′-carbon and the 4′-carbon of the furanosyl.

[0375] As used herein, the term “sugar surrogate” means a structure that does not comprise a furanosyl and that is capable of replacing the naturally occurring sugar moiety of a nucleoside, such that the resulting nucleoside is capable of: (1) incorporation into an oligonucleotide and (2) hybridization to a complementary nucleoside. Such structures include rings comprising a different number of atoms than furanosyl (e.g., 4, 6, or 7-membered rings); replacement of the oxygen of a furanosyl with a non-oxygen atom (e.g., carbon, sulfur, or nitrogen); or both a change in the number of atoms and a replacement of the oxygen. Such structures may also comprise substitutions corresponding to those described for substituted sugar moieties (e.g., 6-membered carbocyclic bicyclic sugar surrogates optionally comprising additional substituents). Sugar surrogates also include more complex sugar replacements (e.g., the non-ring systems of peptide nucleic acid). Sugar surrogates include without limitation morpholino, modified morpholinos, cyclohexenyls and cyclohexitols.

[0376] As used herein, “nucleotide” means a nucleoside further comprising a phosphate linking group.

[0377] As used herein, “linked nucleosides” may or may not be linked by phosphate linkages and thus includes, but is not limited to “linked nucleotides.” As used herein, “linked nucleosides” are nucleosides that are connected in a continuous sequence (i.e. no additional nucleosides are present between those that are linked).

[0378] As used herein, “nucleobase” means a group of atoms that can be linked to a sugar moiety to create a nucleoside that is capable of incorporation into an oligonucleotide, and wherein the group of atoms is capable of bonding with a complementary naturally occurring nucleobase of another oligonucleotide or nucleic acid. Nucleobases may be naturally occurring or may be modified.

[0379] As used herein, “heterocyclic base” or “heterocyclic nucleobase” means a nucleobase comprising a heterocyclic structure.

[0380] As used herein, the terms, “unmodified nucleobase” or “naturally occurring nucleobase” means the naturally occurring heterocyclic nucleobases of RNA or DNA: the purine bases adenine (A) and guanine (G), and the pyrimidine bases thymine (T), cytosine (C) (including 5-methyl C), and uracil (U).

[0381] As used herein, “modified nucleobase” means any nucleobase that is not a naturally occurring nucleobase.

[0382] As used herein, “modified nucleoside” means a nucleoside comprising at least one chemical modification compared to naturally occurring RNA or DNA nucleosides. Modified nucleosides comprise a modified sugar moiety and/or a modified nucleobase.

[0383] As used herein, “bicyclic nucleoside” or “BNA” means a nucleoside comprising a bicyclic sugar moiety.

[0384] As used herein, “constrained ethyl nucleoside” or “cEt” means a nucleoside comprising a bicyclic sugar moiety comprising a 4′—CH(CH₃)-0-2′bridge.

[0385] As used herein, “locked nucleic acid nucleoside” or “LNA” means a nucleoside comprising a bicyclic sugar moiety comprising a 4′—CH₂-0-2′bridge.

[0386] As used herein, “2′-substituted nucleoside” means a nucleoside comprising a substituent at the 2′-position other than H or OH. Unless otherwise indicated, a 2′-substituted nucleoside is not a bicyclic nucleoside.

[0387] As used herein, “2′-deoxynucleoside” means a nucleoside comprising 2′—H furanosyl sugar moiety, as found in naturally occurring deoxyribonucleosides (DNA). In certain embodiments, a 2′-deoxynucleoside may comprise a modified nucleobase or may comprise an RNA nucleobase (e.g., uracil).

[0388] As used herein, “oligonucleotide” means a compound comprising a plurality of linked nucleosides. In certain embodiments, an oligonucleotide comprises one or more unmodified ribonucleosides (RNA) and/or unmodified deoxyribonucleosides (DNA) and/or one or more modified nucleosides.

[0389] As used herein “oligonucleoside” means an oligonucleotide in which none of the internucleoside linkages contains a phosphorus atom. As used herein, oligonucleotides include oligonucleosides.

[0390] As used herein, “modified oligonucleotide” means an oligonucleotide comprising at least one modified nucleoside and/or at least one modified internucleoside linkage.

[0391] As used herein “internucleoside linkage” means a covalent linkage between adjacent nucleosides in an oligonucleotide.

[0392] As used herein “naturally occurring internucleoside linkage” means a 3′ to 5′ phosphodiester linkage.

[0393] As used herein, “modified internucleoside linkage” means any internucleoside linkage other than a naturally occurring internucleoside linkage.

[0394] As used herein, “oligomeric compound” means a polymeric structure comprising two or more substructures. In certain embodiments, an oligomeric compound comprises an oligonucleotide. In certain embodiments, an oligomeric compound comprises one or more conjugate groups and/or terminal groups. In certain embodiments, an oligomeric compound consists of an oligonucleotide.

[0395] As used herein, “terminal group” means one or more atom attached to either, or both, the 3′ end or the 5′ end of an oligonucleotide. In certain embodiments a terminal group is a conjugate group. In certain embodiments, a terminal group comprises one or more terminal group nucleosides.

[0396] As used herein, “conjugate” means an atom or group of atoms bound to an oligonucleotide or oligomeric compound. In general, conjugate groups modify one or more properties of the compound to which they are attached, including, but not limited to, pharmacodynamic, pharmacokinetic, binding, absorption, cellular distribution, cellular uptake, charge and/or clearance properties.

[0397] As used herein. “conjugate linking group” means any atom or group of atoms used to attach a conjugate to an oligonucleotide or oligomeric compound.

[0398] As used herein, “detectable and/or measureable activity” means a statistically significant activity that is not zero.

[0399] As used herein, “essentially unchanged” means little or no change in a particular parameter, particularly relative to another parameter which changes much more. In certain embodiments, a parameter is essentially unchanged when it changes less than 5%. In certain embodiments, a parameter is essentially unchanged if it changes less than two-fold while another parameter changes at least ten-fold. For example, in certain embodiments, an antisense activity is a change in the amount of a target nucleic acid. In certain such embodiments, the amount of a non-target nucleic acid is essentially unchanged if it changes much less than the target nucleic acid does, but the change need not be zero.

[0400] As used herein, the term “about” encompasses insubstantial variations, such as values within a standard margin of error of measurement (e.g., SEM) of a stated value. For example, the term “about” as used herein when referring to a measurable value such as a parameter, an amount, a temporal duration, can encompass variations of +/−10% or less, +/−5% or less, or +/−1% or less or less of and from the specified value. Designation of a range of values includes all integers within or defining the range, and all subranges defined by integers within the range. As used herein, statistical significance means p≤0.05.

[0401] As used herein. “expression” means the process by which a gene ultimately results in a protein. Expression includes, but is not limited to, transcription, post-transcriptional modification (e.g., splicing, polyadenlyation, addition of 5′-cap), and translation.

[0402] As used herein, “target nucleic acid” means a nucleic acid molecule to which an antisense compound hybridizes.

[0403] As used herein, “mRNA” means an RNA molecule that encodes a protein.

[0404] As used herein, “pre-mRNA” means an RNA transcript that has not been fully processed into mRNA. Pre-RNA includes one or more intron.

[0405] As used herein, “transcript” means an RNA molecule transcribed from DNA. Transcripts include, but are not limited to mRNA, pre-mRNA, and partially processed RNA.

[0406] As used herein. “targeting” or “targeted to” means the association of an antisense compound to a particular target nucleic acid molecule or a particular region of a target nucleic acid molecule. An antisense compound targets a target nucleic acid if it is sufficiently complementary to the target nucleic acid to allow hybridization under physiological conditions.

[0407] As used herein, “nucleobase complementarity” or “complementarity” when in reference to nucleobases means a nucleobase that is capable of base pairing with another nucleobase. For example, in DNA, adenine (A) is complementary to thymine (T). For example, in RNA, adenine (A) is complementary to uracil (U). In certain embodiments, complementary nucleobase means a nucleobase of an antisense compound that is capable of base pairing with a nucleobase of its target nucleic acid. For example, if a nucleobase at a certain position of an antisense compound is capable of hydrogen bonding with a nucleobase at a certain position of a target nucleic acid, then the position of hydrogen bonding between the oligonucleotide and the target nucleic acid is considered to be complementary at that nucleobase pair. Nucleobases comprising certain modifications may maintain the ability to pair with a counterpart nucleobase and thus, are still capable of nucleobase complementarity.

[0408] As used herein, “non-complementary” in reference to nucleobases means a pair of nucleobases that do not form hydrogen bonds with one another.

[0409] As used herein, “complementary” in reference to oligomeric compounds (e.g., linked nucleosides, oligonucleotides, or nucleic acids) means the capacity of such oligomeric compounds or regions thereof to hybridize to another oligomeric compound or region thereof through nucleobase complementarity under stringent conditions. Complementary oligomeric compounds need not have nucleobase complementarity at each nucleoside. Rather, some mismatches are tolerated. In certain embodiments, complementary oligomeric compounds or regions are complementary at 70% of the nucleobases (70% complementary). In certain embodiments, complementary oligomeric compounds or regions are 80% complementary. In certain embodiments, complementary oligomeric compounds or regions are 90% complementary. In certain embodiments, complementary oligomeric compounds or regions are 95% complementary. In certain embodiments, complementary oligomeric compounds or regions are 100% complementary.

[0410] As used herein, “hybridization” means the pairing of complementary oligomeric compounds (e.g., an antisense compound and its target nucleic acid). While not limited to a particular mechanism, the most common mechanism of pairing involves hydrogen bonding, which may be Watson-Crick, Hoogsteen or reversed Hoogsteen hydrogen bonding, between complementary nucleobases.

[0411] As used herein, “specifically hybridizes” means the ability of an oligomeric compound to hybridize to one nucleic acid site with greater affinity than it hybridizes to another nucleic acid site. In certain embodiments, an antisense oligonucleotide specifically hybridizes to more than one target site.

[0412] As used herein, “percent complementarity” means the percentage of nucleobases of an oligomeric compound that are complementary to an equal-length portion of a target nucleic acid. Percent complementarity is calculated by dividing the number of nucleobases of the oligomeric compound that are complementary to nucleobases at corresponding positions in the target nucleic acid by the total length of the oligomeric compound.

[0413] As used herein. “percent identity” means the number of nucleobases in a first nucleic acid that are the same type (independent of chemical modification) as nucleobases at corresponding positions in a second nucleic acid, divided by the total number of nucleobases in the first nucleic acid.

[0414] As used herein, “modulation” means a change of amount or quality of a molecule, function, or activity when compared to the amount or quality of a molecule, function, or activity prior to modulation. For example, modulation includes the change, either an increase (stimulation or induction) or a decrease (inhibition or reduction) in gene expression. As a further example, modulation of expression can include a change in splice site selection of pre-mRNA processing, resulting in a change in the absolute or relative amount of a particular splice-variant compared to the amount in the absence of modulation.

[0415] As used herein, “motif “means a pattern of chemical modifications in an oligomeric compound or a region thereof. Motifs may be defined by modifications at certain nucleosides and/or at certain linking groups of an oligomeric compound.

[0416] As used herein, “nucleoside motif” means a pattern of nucleoside modifications in an oligomeric compound or a region thereof. The linkages of such an oligomeric compound may be modified or unmodified. Unless otherwise indicated, motifs herein describing only nucleosides are intended to be nucleoside motifs. Thus, in such instances, the linkages are not limited.

[0417] As used herein, “sugar motif” means a pattern of sugar modifications in an oligomeric compound or a region thereof.

[0418] As used herein, “linkage motif” means a pattern of linkage modifications in an oligomeric compound or region thereof. The nucleosides of such an oligomeric compound may be modified or unmodified. Unless otherwise indicated, motifs herein describing only linkages are intended to be linkage motifs. Thus, in such instances, the nucleosides are not limited.

[0419] As used herein, “nucleobase modification motif” means a pattern of modifications to nucleobases along an oligonucleotide. Unless otherwise indicated, a nucleobase modification motif is independent of the nucleobase sequence.

[0420] As used herein. “sequence motif” means a pattern of nucleobases arranged along an oligonucleotide or portion thereof. Unless otherwise indicated, a sequence motif is independent of chemical modifications and thus may have any combination of chemical modifications, including no chemical modifications.

[0421] As used herein, “type of modification” in reference to a nucleoside or a nucleoside of a “type” means the chemical modification of a nucleoside and includes modified and unmodified nucleosides. Accordingly, unless otherwise indicated, a “nucleoside having a modification of a first type” may be an unmodified nucleoside.

[0422] As used herein, “differently modified” mean chemical modifications or chemical substituents that are different from one another, including absence of modifications. Thus, for example, a MOE nucleoside and an unmodified DNA nucleoside are “differently modified,” even though the DNA nucleoside is unmodified. Likewise, DNA and RNA are “differently modified.” even though both are naturally-occurring unmodified nucleosides. Nucleosides that are the same but for comprising different nucleobases are not differently modified. For example, a nucleoside comprising a 2′-OMe modified sugar and an unmodified adenine nucleobase and a nucleoside comprising a 2′-OMe modified sugar and an unmodified thymine nucleobase are not differently modified.

[0423] As used herein, “the same type of modifications” refers to modifications that are the same as one another, including absence of modifications. Thus, for example, two unmodified DNA nucleoside have “the same type of modification.” even though the DNA nucleoside is unmodified. Such nucleosides having the same type modification may comprise different nucleobases.

[0424] As used herein. “pharmaceutically acceptable carrier or diluent” means any substance suitable for use in administering to an animal. In certain embodiments, a pharmaceutically acceptable carrier or diluent is sterile saline. In certain embodiments, such sterile saline is pharmaceutical grade saline.

### Certain Motifs

[0425] In certain embodiments, the present invention provides oligomeric compounds comprising oligonucleotides. In certain embodiments, such oligonucleotides comprise one or more chemical modification. In certain embodiments, chemically modified oligonucleotides comprise one or more modified nucleosides. In certain embodiments, chemically modified oligonucleotides comprise one or more modified nucleosides comprising modified sugars. In certain embodiments, chemically modified oligonucleotides comprise one or more modified nucleosides comprising one or more modified nucleobases. In certain embodiments, chemically modified oligonucleotides comprise one or more modified internucleoside linkages. In certain embodiments, the chemically modifications (sugar modifications, nucleobase modifications, and/or linkage modifications) define a pattern or motif. In certain embodiments, the patterns of chemical modifications of sugar moieties, internucleoside linkages, and nucleobases are each independent of one another. Thus, an oligonucleotide may be described by its sugar modification motif, internucleoside linkage motif and/or nucleobase modification motif (as used herein, nucleobase modification motif describes the chemical modifications to the nucleobases independent of the sequence of nucleobases).

### Certain Sugar Motifs

[0426] In certain embodiments, oligonucleotides comprise one or more type of modified sugar moieties and/or naturally occurring sugar moieties arranged along an oligonucleotide or region thereof in a defined pattern or sugar modification motif. Such motifs may include any of the sugar modifications discussed herein and/or other known sugar modifications.

[0427] In certain embodiments, the oligonucleotides comprise or consist of a region having a gapmer sugar modification motif, which comprises two external regions or “wings” and an internal region or “gap.” The three regions of a gapmer motif (the 5′-wing, the gap, and the 3′-wing) form a contiguous sequence of nucleosides wherein at least some of the sugar moieties of the nucleosides of each of the wings differ from at least some of the sugar moieties of the nucleosides of the gap. Specifically, at least the sugar moieties of the nucleosides of each wing that are closest to the gap (the 3′-most nucleoside of the 5′-wing and the 5′-most nucleoside of the 3′-wing) differ from the sugar moiety of the neighboring gap nucleosides, thus defining the boundary between the wings and the gap. In certain embodiments, the sugar moieties within the gap are the same as one another. In certain embodiments, the gap includes one or more nucleoside having a sugar moiety that differs from the sugar moiety of one or more other nucleosides of the gap. In certain embodiments, the sugar modification motifs of the two wings are the same as one another (symmetric gapmer). In certain embodiments, the sugar modification motifs of the 5′-wing differs from the sugar modification motif of the 3′-wing (asymmetric gapmer). In certain embodiments, oligonucleotides comprise 2′-MOE modified nucleosides in the wings and 2′-F modified nucleosides in the gap.

[0428] In certain embodiments, oligonucleotides are fully modified. In certain such embodiments, oligonucleotides are uniformly modified. In certain embodiments, oligonucleotides are uniform 2′-MOE. In certain embodiments, oligonucleotides are uniform 2′-F. In certain embodiments, oligonucleotides are uniform morpholino. In certain embodiments, oligonucleotides are uniform BNA. In certain embodiments, oligonucleotides are uniform LNA. In certain embodiments, oligonucleotides are uniform cEt.

[0429] In certain embodiments, oligonucleotides comprise a uniformly modified region and additional nucleosides that are unmodified or differently modified. In certain embodiments, the uniformly modified region is at least 5, 10, 15, 20 or 25 nucleosides in length. In certain embodiments, the uniform region is a 2′-MOE region. In certain embodiments, the uniform region is a 2′-F region. In certain embodiments, the uniform region is a morpholino region. In certain embodiments, the uniform region is a BNA region. In certain embodiments, the uniform region is a LNA region. In certain embodiments, the uniform region is a cEt region.

[0430] In certain embodiments, the oligonucleotide does not comprise more than 4 contiguous unmodified 2′-deoxynucleosides. In certain circumstances, antisense oligonucleotides comprising more than 4 contiguous 2′-deoxynucleosides activate RNase H, resulting in cleavage of the target RNA. In certain embodiments, such cleavage is avoided by not having more than 4 contiguous 2′-deoxynucleosides, for example, where alteration of splicing and not cleavage of a target RNA is desired.

Certain internucleoside Linkage Motifs

[0431] In certain embodiments, oligonucleotides comprise modified internucleoside linkages arranged along the oligonucleotide or region thereof in a defined pattern or modified internucleoside linkage motif. In certain embodiments, internucleoside linkages are arranged in a gapped motif, as described above for sugar modification motif. In such embodiments, the internucleoside linkages in each of two wing regions are different from the internucleoside linkages in the gap region. In certain embodiments the internucleoside linkages in the wings are phosphodiester and the internucleoside linkages in the gap are phosphorothioate. The sugar modification motif is independently selected, so such oligonucleotides having a gapped internucleoside linkage motif may or may not have a gapped sugar modification motif and if it does have a gapped sugar motif, the wing and gap lengths may or may not be the same.

[0432] In certain embodiments, oligonucleotides comprise a region having an alternating internucleoside linkage motif. In certain embodiments, oligonucleotides of the present invention comprise a region of uniformly modified internucleoside linkages. In certain such embodiments, the oligonucleotide comprises a region that is uniformly linked by phosphorothioate internucleoside linkages. In certain embodiments, the oligonucleotide is uniformly linked by phosphorothioate. In certain embodiments, each internucleoside linkage of the oligonucleotide is selected from phosphodiester and phosphorothioate. In certain embodiments, each internucleoside linkage of the oligonucleotide is selected from phosphodiester and phosphorothioate and at least one internucleoside linkage is phosphorothioate.

[0433] In certain embodiments, the oligonucleotide comprises at least 6 phosphorothioate internucleoside linkages. In certain embodiments, the oligonucleotide comprises at least 8 phosphorothioate internucleoside linkages. In certain embodiments, the oligonucleotide comprises at least 10 phosphorothioate internucleoside linkages. In certain embodiments, the oligonucleotide comprises at least one block of at least 6 consecutive phosphorothioate internucleoside linkages. In certain embodiments, the oligonucleotide comprises at least one block of at least 8 consecutive phosphorothioate internucleoside linkages. In certain embodiments, the oligonucleotide comprises at least one block of at least 10 consecutive phosphorothioate internucleoside linkages. In certain embodiments, the oligonucleotide comprises at least block of at least one 12 consecutive phosphorothioate internucleoside linkages. In certain such embodiments, at least one such block is located at the 3′ end of the oligonucleotide. In certain such embodiments, at least one such block is located within 3 nucleosides of the 3′ end of the oligonucleotide.

### Certain Nucleobase Modification Motifs

[0434] In certain embodiments, oligonucleotides comprise chemical modifications to nucleobases arranged along the oligonucleotide or region thereof in a defined pattern or nucleobases modification motif. In certain such embodiments, nucleobase modifications are arranged in a gapped motif. In certain embodiments, nucleobase modifications are arranged in an alternating motif. In certain embodiments, each nucleobase is modified. In certain embodiments, none of the nucleobases is chemically modified.

[0435] In certain embodiments, oligonucleotides comprise a block of modified nucleobases. In certain such embodiments, the block is at the 3′-end of the oligonucleotide. In certain embodiments the block is within 3 nucleotides of the 3′-end of the oligonucleotide. In certain such embodiments, the block is at the 5′-end of the oligonucleotide. In certain embodiments the block is within 3 nucleotides of the 5′-end of the oligonucleotide.

[0436] In certain embodiments, nucleobase modifications are a function of the natural base at a particular position of an oligonucleotide. For example, in certain embodiments each purine or each pyrimidine in an oligonucleotide is modified. In certain embodiments, each adenine is modified. In certain embodiments, each guanine is modified. In certain embodiments, each thymine is modified. In certain embodiments, each cytosine is modified. In certain embodiments, each uracil is modified.

[0437] In certain embodiments, some, all, or none of the cytosine moieties in an oligonucleotide are 5-methyl cytosine moieties. Herein, 5-methyl cytosine is not a “modified nucleobase.” Accordingly, unless otherwise indicated, unmodified nucleobases include both cytosine residues having a 5-methyl and those lacking a 5 methyl. In certain embodiments, the methylation state of all or some cytosine nucleobases is specified.

### Certain Overall Lengths

[0438] In certain embodiments, the present invention provides oligomeric compounds including oligonucleotides of any of a variety of ranges of lengths. In certain embodiments, the invention provides oligomeric compounds or oligonucleotides consisting of X to Y linked nucleosides, where X represents the fewest number of nucleosides in the range and Y represents the largest number of nucleosides in the range. In certain such embodiments, X and Y are each independently selected from 8, 9. 10, 11, 12, 13, 14, 15, 16, 17, 18, 19, 20, 21, 22, 23, 24, 25, 26, 27, 28, 29, 30, 31, 32, 33, 34, 35, 36, 37, 38, 39, 40, 41, 42, 43, 44, 45, 46, 47, 48, 49, and 50; provided that X<Y. For example, in certain embodiments, the invention provides oligomeric compounds which comprise oligonucleotides consisting of 8 to 9, 8 to 10, 8 to 11, 8 to 12, 8 to 13, 8 to 14, 8 to 15, 8 to 16, 8 to 17, 8 to 18, 8 to 19, 8 to 20, 8 to 21, 8 to 22, 8 to 23, 8 to 24, 8 to 25, 8 to 26, 8 to 27, 8 to 28, 8 to 29, 8 to 30, 9 to 10, 9 to 11, 9 to 12, 9 to 13, 9 to 14, 9 to 15, 9 to 16, 9 to 17, 9 to 18, 9 to 19, 9 to 20, 9 to 21, 9 to 22, 9 to 23, 9 to 24, 9 to 25, 9 to 26, 9 to 27, 9 to 28, 9 to 29, 9 to 30, 10 to 11, 10 to 12, 10 to 13, 10 to 14, 10 to 15, 10 to 16, 10 to 17, 10 to 18, 10 to 19, 10 to 20, 10 to 21, 10 to 22, 10 to 23, 10 to 24, 10 to 25, 10 to 26, 10 to 27, 10 to 28, 10 to 29, 10 to 30, 11 to 12, 11 to 13, 11 to 14, 11 to 15, 11 to 16, 11 to 17, 11 to 18, 11 to 19, 11 to 20, 11 to 21, 11 to 22, 11 to 23, 11 to 24, 11 to 25, 11 to 26, 11 to 27, 11 to 28, 11 to 29, 11 to 30, 12 to 13, 12 to 14, 12 to 15, 12 to 16, 12 to 17, 12 to 18, 12 to 19, 12 to 20, 12 to 21, 12 to 22, 12 to 23, 12 to 24, 12 to 25, 12 to 26, 12 to 27, 12 to 28, 12 to 29, 12 to 30, 13 to 14, 13 to 15, 13 to 16, 13 to 17, 13 to 18, 13 to 19, 13 to 20, 13 to 21, 13 to 22, 13 to 23, 13 to 24, 13 to 25, 13 to 26, 13 to 27, 13 to 28, 13 to 29, 13 to 30, 14 to 15, 14 to 16, 14 to 17, 14 to 18, 14 to 19, 14 to 20, 14 to 21, 14 to 22, 14 to 23, 14 to 24, 14 to 25, 14 to 26, 14 to 27, 14 to 28, 14 to 29, 14 to 30, 15 to 16, 15 to 17, 15 to 18, 15 to 19, 15 to 20, 15 to 21, 15 to 22, 15 to 23, 15 to 24, 15 to 25, 15 to 26, 15 to 27, 15 to 28, 15 to 29, 15 to 30, 16 to 17, 16 to 18, 16 to 19, 16 to 20, 16 to 21, 16 to 22, 16 to 23, 16 to 24, 16 to 25, 16 to 26, 16 to 27, 16 to 28, 16 to 29, 16 to 30, 17 to 18, 17 to 19, 17 to 20, 17 to 21, 17 to 22, 17 to 23, 17 to 24, 17 to 25, 17 to 26, 17 to 27, 17 to 28, 17 to 29, 17 to 30, 18 to 19, 18 to 20, 18 to 21, 18 to 22, 18 to 23, 18 to 24, 18 to 25, 18 to 26, 18 to 27, 18 to 28, 18 to 29, 18 to 30, 19 to 20, 19 to 21, 19 to 22, 19 to 23, 19 to 24, 19 to 25, 19 to 26, 19 to 29, 19 to 28, 19 to 29, 19 to 30, 20 to 21, 20 to 22, 20 to 23, 20 to 24, 20 to 25, 20 to 26, 20 to 27, 20 to 28, 20 to 29, 20 to 30, 21 to 22, 21 to 23, 21 to 24, 21 to 25, 21 to 26, 21 to 27, 21 to 28, 21 to 29, 21 to 30, 22 to 23, 22 to 24, 22 to 25, 22 to 26, 22 to 27, 22 to 28, 22 to 29, 22 to 30, 23 to 24, 23 to 25, 23 to 26, 23 to 27, 23 to 28, 23 to 29, 23 to 30, 24 to 25, 24 to 26, 24 to 27, 24 to 28, 24 to 29, 24 to 30, 25 to 26, 25 to 27, 25 to 28, 25 to 29, 25 to 30, 26 to 27, 26 to 28, 26 to 29, 26 to 30, 27 to 28, 27 to 29, 27 to 30, 28 to 29, 28 to 30, or 29 to 30 linked nucleosides. In embodiments where the number of nucleosides of an oligomeric compound or oligonucleotide is limited, whether to a range or to a specific number, the oligomeric compound or oligonucleotide may, nonetheless further comprise additional other substituents. For example, an oligonucleotide comprising 8-30 nucleosides excludes oligonucleotides having 31 nucleosides, but, unless otherwise indicated, such an oligonucleotide may further comprise, for example one or more conjugates, terminal groups, or other substituents. In certain embodiments, a gapmer oligonucleotide has any of the above lengths.

[0439] One of skill in the art will appreciate that certain lengths may not be possible for certain motifs. For example: a gapmer having a 5′-wing region consisting of four nucleotides, a gap consisting of at least six nucleotides, and a 3′-wing region consisting of three nucleotides cannot have an overall length less than 13 nucleotides. Thus, one would understand that the lower length limit is 13 and that the limit of 10 in “10-20” has no effect in that embodiment. Further, where an oligonucleotide is described by an overall length range and by regions having specified lengths, and where the sum of specified lengths of the regions is less than the upper limit of the overall length range, the oligonucleotide may have additional nucleosides, beyond those of the specified regions, provided that the total number of nucleosides does not exceed the upper limit of the overall length range. For example, an oligonucleotide consisting of 20-25 linked nucleosides comprising a 5′-wing consisting of 5 linked nucleosides; a 3′-wing consisting of 5 linked nucleosides and a central gap consisting of 10 linked nucleosides (5+5+10=20) may have up to 5 nucleosides that are not part of the 5′-wing, the 3′-wing, or the gap (before reaching the overall length limitation of 25). Such additional nucleosides may be 5′ of the 5′-wing and/or 3′ of the 3′ wing.

### Certain Oligonucleotides

[0440] In certain embodiments, oligonucleotides of the present invention are characterized by their sugar motif, internucleoside linkage motif, nucleobase modification motif and overall length. In certain embodiments, such parameters are each independent of one another. Thus, each internucleoside linkage of an oligonucleotide having a gapmer sugar motif may be modified or unmodified and may or may not follow the gapmer modification pattern of the sugar modifications. Thus, the internucleoside linkages within the wing regions of a sugar-gapmer may be the same or different from one another and may be the same or different from the internucleoside linkages of the gap region. Likewise, such sugar-gapmer oligonucleotides may comprise one or more modified nucleobase independent of the gapmer pattern of the sugar modifications. Herein if a description of an oligonucleotide or oligomeric compound is silent with respect to one or more parameter, such parameter is not limited. Thus, an oligomeric compound described only as having a gapmer sugar motif without further description may have any length, internucleoside linkage motif, and nucleobase modification motif. Unless otherwise indicated, all chemical modifications are independent of nucleobase sequence.

### Certain Conjugate Groups

[0441] In certain embodiments, oligomeric compounds are modified by attachment of one or more conjugate groups. In general, conjugate groups modify one or more properties of the attached oligomeric compound including but not limited to pharmacodynamics, pharmacokinetics, stability, binding, absorption, cellular distribution, cellular uptake, charge and clearance. Conjugate groups are routinely used in the chemical arts and are linked directly or via an optional conjugate linking moiety or conjugate linking group to a parent compound such as an oligomeric compound, such as an oligonucleotide. Conjugate groups includes without limitation, intercalators, reporter molecules, polyamines, polyamides, polyethylene glycols, thioethers, polyethers, cholesterols, thiocholesterols, cholic acid moieties, folate, lipids, phospholipids, biotin, phenazine, phenanthridine, anthraquinone, adamantane, acridine, fluoresceins, rhodamines, coumarins and dyes. Certain conjugate groups have been described previously, for example: cholesterol moiety (Letsinger et al., Proc. Natl. Acad. Sci. USA, 1989, 86, 6553-6556), cholic acid (Manoharan et al., Bioorg. Med. Chem. Let., 1994, 4, 1053-1060), a thioether, e.g., hexyl-S-tritylthiol (Manoharan et al., Ann. N.Y. Acad. Sci., 1992, 660, 306-309; Manoharan et al., Bioorg. Med. Chem. Let., 1993, 3, 2765-2770), a thiocholesterol (Oberhauser et al., Nucl. Acids Res., 1992, 20, 533-538), an aliphatic chain, e.g., do-decan-diol or undecyl residues (Saison-Bchmoaras et al., EMBO J., 1991, 10, 1111-1118; Kabanov et al., FEBS Lett, 1990, 259, 327-330; Svinarchuk et al., Biochimie, 1993, 75, 49-54), a phospholipid, e.g., di-hexadecyl-rac-glycerol or tricthyl-ammonium 1.2-di-O-hexadecyl-rac-glycero-3-H-phosphonate (Manoharan et al., Tetrahedron Lett., 1995, 36:3651-3654; Shea et al., Nucl. Acids Res., 1990, 18, 3777-3783), a polyamine or a polyethylene glycol chain (Manoharan et al., Nucleosides & Nucleotides, 1995, 14, 969-973), or adamantane acetic acid (Manoharan et al., Tetrahedron Lett., 1995, 36:3651-3654), a palmityl moiety (Mishra et al., Biochim. Biophys. Acta, 1995, 1264, 229-237), or an octadecylamine or hexylamino-carbonyl-oxycholesterol moiety (Crooke et al., J. Pharmacol. Exp. Ther., 1996, 277, 923-937).

[0442] In certain embodiments, a conjugate group comprises an active drug substance, for example, aspirin, warfarin, phenylbutazone, ibuprofen, suprofen, fen-bufen, ketoprofen, (S)-(+)-pranoprofen, carprofen, dansylsarcosine, 2,3,5-triiodobenzoic acid, flufenamic acid, folinic acid, a benzothiadiazide, chlorothiazide, a diazepine, indo-methicin, a barbiturate, a cephalosporin, a sulfa drug, an antidiabetic, an antibacterial or an antibiotic.

[0443] In certain embodiments, conjugate groups are directly attached to oligonucleotides in oligomeric compounds. In certain embodiments, conjugate groups are attached to oligonucleotides by a conjugate linking group. In certain such embodiments, conjugate linking groups, including, but not limited to, bifunctional linking moieties such as those known in the art are amenable to the compounds provided herein. Conjugate linking groups are useful for attachment of conjugate groups, such as chemical stabilizing groups, functional groups, reporter groups and other groups to selective sites in a parent compound such as for example an oligomeric compound. In general a bifunctional linking moiety comprises a hydrocarbyl moiety having two functional groups. One of the functional groups is selected to bind to a parent molecule or compound of interest and the other is selected to bind essentially any selected group such as chemical functional group or a conjugate group. In some embodiments, the conjugate linker comprises a chain structure or an oligomer of repeating units such as ethylene glycol or amino acid units. Examples of functional groups that are routinely used in a bifunctional linking moiety include, but are not limited to, electrophiles for reacting with nucleophilic groups and nucleophiles for reacting with electrophilic groups. In some embodiments, bifunctional linking moieties include amino, hydroxyl, carboxylic acid, thiol, unsaturations (e.g., double or triple bonds), and the like.

[0444] Some nonlimiting examples of conjugate linking moieties include pyrrolidine, 8-amino-3,6-dioxaoctanoic acid (ADO), succinimidyl 4-(N-maleimidomethyl)cyclohexane-1-carboxylate (SMCC) and 6-aminohexanoic acid (AHEX or AHA). Other linking groups include, but are not limited to, substituted C₂-C₁₀ alkyl, substituted or unsubstituted C₂-C₁₀ alkenyl or substituted or unsubstituted C₂-C₁₀ alkynyl, wherein a nonlimiting list of preferred substituent groups includes hydroxyl, amino, alkoxy, carboxy, benzyl, phenyl, nitro, thiol, thioalkoxy, halogen, alkyl, aryl, alkenyl and alkynyl.

[0445] Conjugate groups may be attached to either or both ends of an oligonucleotide (terminal conjugate groups) and/or at any internal position.

[0446] In certain embodiments, conjugate groups are at the 3′-end of an oligonucleotide of an oligomeric compound. In certain embodiments, conjugate groups are near the 3′-end. In certain embodiments, conjugates are attached at the 3′end of an oligomeric compound, but before one or more terminal group nucleosides. In certain embodiments, conjugate groups are placed within a terminal group.

[0447] In certain embodiments, the present invention provides oligomeric compounds. In certain embodiments, oligomeric compounds comprise an oligonucleotide. In certain embodiments, an oligomeric compound comprises an oligonucleotide and one or more conjugate and/or terminal groups. Such conjugate and/or terminal groups may be added to oligonucleotides having any of the chemical motifs discussed above. Thus, for example, an oligomeric compound comprising an oligonucleotide having region of alternating nucleosides may comprise a terminal group.

### Antisense Compounds

[0448] In certain embodiments, oligomeric compounds of the present invention are antisense compounds. Such antisense compounds are capable of hybridizing to a target nucleic acid, resulting in at least one antisense activity. In certain embodiments, antisense compounds specifically hybridize to one or more target nucleic acid. In certain embodiments, a specifically hybridizing antisense compound has a nucleobase sequence comprising a region having sufficient complementarity to a target nucleic acid to allow hybridization and result in antisense activity and insufficient complementarity to any non-target so as to avoid non-specific hybridization to any non-target nucleic acid sequences under conditions in which specific hybridization is desired (e.g., under physiological conditions for in vivo or therapeutic uses, and under conditions in which assays are performed in the case of in vitro assays).

[0449] In certain embodiments, the present invention provides antisense compounds comprising oligonucleotides that are fully complementary to the target nucleic acid over the entire length of the oligonucleotide. In certain embodiments, oligonucleotides are 99% complementary to the target nucleic acid. In certain embodiments, oligonucleotides are 95% complementary to the target nucleic acid. In certain embodiments, such oligonucleotides are 90% complementary to the target nucleic acid. In certain embodiments, such oligonucleotides are 85% complementary to the target nucleic acid. In certain embodiments, such oligonucleotides are 80% complementary to the target nucleic acid. In certain embodiments, an antisense compound comprises a region that is fully complementary to a target nucleic acid and is at least 80% complementary to the target nucleic acid over the entire length of the oligonucleotide. In certain such embodiments, the region of full complementarity is from 6 to 14 nucleobases in length.

[0450] In certain embodiments antisense compounds and antisense oligonucleotides comprise single-strand compounds. In certain embodiments antisense compounds and antisense oligonucleotides comprise double-strand compounds.

### Pharmaceutical Compositions

[0451] In certain embodiments, the present invention provides pharmaceutical compositions comprising one or more antisense compound. The pharmaceutical composition may comprise a cocktail of antisense compounds, wherein the cocktail comprises 2, 3, 4, 5, 6, 7, 8, 9, 10 or more antisense compounds. In certain embodiments, such pharmaceutical composition comprises a suitable pharmaceutically acceptable diluent or carrier. In certain embodiments, a pharmaceutical composition comprises a sterile saline solution and one or more antisense compound. In certain embodiments, such pharmaceutical composition consists of a sterile saline solution and one or more antisense compound. In certain embodiments, the sterile saline is pharmaceutical grade saline. In certain embodiments, a pharmaceutical composition comprises one or more antisense compound and sterile water. In certain embodiments, a pharmaceutical composition consists of one or more antisense compound and sterile water. In certain embodiments, the sterile saline is pharmaceutical grade water. In certain embodiments, a pharmaceutical composition comprises one or more antisense compound and phosphate-buffered saline (PBS). In certain embodiments, a pharmaceutical composition consists of one or more antisense compound and sterile phosphate-buffered saline (PBS). In certain embodiments, the sterile saline is pharmaceutical grade PBS.

[0452] In certain embodiments, antisense compounds may be admixed with pharmaceutically acceptable active and/or inert substances for the preparation of pharmaceutical compositions or formulations.

[0453] In certain embodiments, the antisense compounds may be combined with a cystic fibrosis transmembrane conductance regulator (CFTR) modulator or a CFTR modulator therapy. CFTR modulator therapies are designed to correct the malfunctioning protein made by the CFTR gene. In some embodiments, CFTR modulators can be ivacaftor (VX-770), lumacaftor (VX-809), tezacaftor (VX-661), elexacaftor (VX-445), bamocaftor (VX-659), olacaftor (VX-440), vanzacaftor (VX-121), deutivacaftor (VX-561) (formerly CTP-656), VX-152, ABBV-2222 (galicaftor, formerly GLPG2222), ABBV-3221, ABBV-3067, ABBV-191, ABBV-974 (formerly GLPG-1837), ABBV-2451 (formerly GLPG-2451), ABBV-3067 (formerly GLPG3067), ELX-02 (NB124), FDL169, cavonstat (N91115), MRT5005, ataluren (PTC124), posencaftor (PTI-801), nesolicaftor (PTI-428), sodium 4-phenylbutarate (4PBA), SION-638, SION-109, SION-451, SION-719, VRT-532, N6022, or combinations thereof. In some embodiments, a CFRT modulator therapy can comprise Kalydeco® (ivacaftor), Orkambi® (lumacaftor and ivacaftor), Symdeko® (tezacaftor and ivacaftor), Trikafta® (elexacaftor and tezacaftor and ivacaftor), or VX-661+VX-561+VX121. In some embodiments, a CFTR modulator dose can comprise 10, 20, 25, 30, 50, 75, 100, 150, 200, 250, 300, 350, 400, 450, 500, 550, or 600 mg once or twice daily.

[0454] Compositions and methods for the formulation of pharmaceutical compositions depend on a number of criteria, including, but not limited to, route of administration, extent of disease, or dose to be administered.

[0455] Pharmaceutical compositions comprising antisense compounds encompass any pharmaceutically acceptable salts, esters, or salts of such esters. In certain embodiments, pharmaceutical compositions comprising antisense compounds comprise one or more oligonucleotide which, upon administration to an animal, including a human, is capable of providing (directly or indirectly) the biologically active metabolite or residue thereof. Accordingly, for example, the disclosure is also drawn to pharmaceutically acceptable salts of antisense compounds, prodrugs, pharmaceutically acceptable salts of such prodrugs, and other bioequivalents. Suitable pharmaceutically acceptable salts include, but are not limited to, sodium and potassium salts.

[0456] A prodrug can include the incorporation of additional nucleosides at one or both ends of an oligomeric compound which are cleaved by endogenous nucleases within the body, to form the active antisense oligomeric compound.

[0457] Lipid moieties have been used in nucleic acid therapies in a variety of methods. In certain such methods, the nucleic acid is introduced into preformed liposomes or lipoplexes made of mixtures of cationic lipids and neutral lipids. In certain methods, DNA complexes with mono—or poly-cationic lipids are formed without the presence of a neutral lipid. In certain embodiments, a lipid moiety is selected to increase distribution of a pharmaceutical agent to a particular cell or tissue. In certain embodiments, a lipid moiety is selected to increase distribution of a pharmaceutical agent to fat tissue. In certain embodiments, a lipid moiety is selected to increase distribution of a pharmaceutical agent to muscle tissue.

[0458] In certain embodiments, pharmaceutical compositions provided herein comprise one or more modified oligonucleotides and one or more excipients. In certain such embodiments, excipients are selected from water, salt solutions, alcohol, polyethylene glycols, gelatin, lactose, amylase, magnesium stearate, talc, silicic acid, viscous paraffin, hydroxymethylcellulose and polyvinylpyrrolidone.

[0459] In certain embodiments, a pharmaceutical composition provided herein comprises a delivery system. Examples of delivery systems include, but are not limited to, liposomes and emulsions. Certain delivery systems are useful for preparing certain pharmaceutical compositions including those comprising hydrophobic compounds. In certain embodiments, certain organic solvents such as dimethylsulfoxide (DMSO) are used.

[0460] In certain embodiments, a pharmaceutical composition provided herein comprises one or more tissue-specific delivery molecules designed to deliver the one or more pharmaceutical agents of the present invention to specific tissues or cell types. For example, in certain embodiments, pharmaceutical compositions include liposomes coated with a tissue-specific antibody.

[0461] In certain embodiments, a pharmaceutical composition provided herein comprises a co-solvent system. Certain of such co-solvent systems comprise, for example, benzyl alcohol, a nonpolar surfactant, a water-miscible organic polymer, and an aqueous phase. In certain embodiments, such co-solvent systems are used for hydrophobic compounds. A non-limiting example of such a co-solvent system is the VPD co-solvent system, which is a solution of absolute ethanol comprising 3% w/v benzyl alcohol, 8% w/v of the nonpolar surfactant Polysorbate 80TM and 65% w/v polyethylene glycol 300. The proportions of such co-solvent systems may be varied considerably without significantly altering their solubility and toxicity characteristics. Furthermore, the identity of co-solvent components may be varied: for example, other surfactants may be used instead of Polysorbate 80TM: the fraction size of polyethylene glycol may be varied: other biocompatible polymers may replace polyethylene glycol, e.g., polyvinyl pyrrolidone; and other sugars or polysaccharides may substitute for dextrose.

[0462] In certain embodiments, a pharmaceutical composition provided herein is prepared for oral administration. In certain embodiments, pharmaceutical compositions are prepared for buccal administration.

[0463] In certain embodiments, a pharmaceutical composition is prepared for administration by injection (e.g., intravenous, subcutaneous, intramuscular, etc.). In certain of such embodiments, a pharmaceutical composition comprises a carrier and is formulated in aqueous solution, such as water or physiologically compatible buffers such as Hanks's solution, Ringer's solution, or physiological saline buffer. In certain embodiments, other ingredients are included (e.g., ingredients that aid in solubility or serve as preservatives). In certain embodiments, injectable suspensions are prepared using appropriate liquid carriers, suspending agents and the like. Certain pharmaceutical compositions for injection are presented in unit dosage form, e.g., in ampoules or in multi-dose containers. Certain pharmaceutical compositions for injection are suspensions, solutions or emulsions in oily or aqueous vehicles, and may contain formulatory agents such as suspending, stabilizing and/or dispersing agents. Certain solvents suitable for use in pharmaceutical compositions for injection include, but are not limited to, lipophilic solvents and fatty oils, such as sesame oil, synthetic fatty acid esters, such as ethyl oleate or triglycerides, and liposomes. Aqueous injection suspensions may contain substances that increase the viscosity of the suspension, such as sodium carboxymethyl cellulose, sorbitol, or dextran. Optionally, such suspensions may also contain suitable stabilizers or agents that increase the solubility of the pharmaceutical agents to allow for the preparation of highly concentrated solutions.

[0464] In certain embodiments, a pharmaceutical composition provided herein comprises an oligonucleotide in a therapeutically effective amount. In certain embodiments, the therapeutically effective amount is sufficient to prevent, alleviate or ameliorate symptoms of a disease or to prolong the survival of the subject being treated. Determination of a therapeutically effective amount is well within the capability of those skilled in the art.

[0465] In certain embodiments, one or more modified oligonucleotide provided herein is formulated as a prodrug. In certain embodiments, upon in vivo administration, a prodrug is chemically converted to the biologically, pharmaceutically or therapeutically more active form of an oligonucleotide. In certain embodiments, prodrugs are useful because they are easier to administer than the corresponding active form. For example, in certain instances, a prodrug may be more bioavailable (e.g., through oral administration) than is the corresponding active form. In certain instances, a prodrug may have improved solubility compared to the corresponding active form. In certain embodiments, prodrugs are less water soluble than the corresponding active form. In certain instances, such prodrugs possess superior transmittal across cell membranes, where water solubility is detrimental to mobility. In certain embodiments, a prodrug is an ester. In certain such embodiments, the ester is metabolically hydrolyzed to carboxylic acid upon administration. In certain instances the carboxylic acid containing compound is the corresponding active form. In certain embodiments, a prodrug comprises a short peptide (polyaminoacid) bound to an acid group. In certain of such embodiments, the peptide is cleaved upon administration to form the corresponding active form.

[0466] In certain embodiments, the present invention provides compositions and methods for reducing the amount or activity of a target nucleic acid in a cell. In certain embodiments, the cell is in an animal. In certain embodiments, the animal is a mammal. In certain embodiments, the animal is a rodent. In certain embodiments, the animal is a primate. In certain embodiments, the animal is a non-human primate. In certain embodiments, the animal is a human. In certain embodiments, the animal is a mouse.

[0467] In certain embodiments, the present invention provides methods of administering a pharmaceutical composition comprising an oligomeric compound of the present invention to an animal. Suitable administration routes include, but are not limited to, oral, rectal, transmucosal, transdermal, intestinal, enteral, topical, suppository, through inhalation, intrathecal, intracerebroventricular, intraperitoneal, intranasal, intratumoral, and parenteral (e.g., intravenous, intramuscular, intramedullary, and subcutaneous). In certain embodiments, a pharmaceutical composition is prepared for transmucosal administration. In certain of such embodiments penetrants appropriate to the barrier to be permeated are used in the formulation. Such penetrants are generally known in the art. In certain embodiments, pharmaceutical compositions are administered to achieve local rather than systemic exposures. For example, pharmaceutical compositions may be aerosolized and inhaled directly in the area of desired effect (e.g., into the lungs).

[0468] In certain embodiments, a pharmaceutical composition is administered to an animal having at least one symptom associated with Cystic Fibrosis. In certain embodiments, such administration results in amelioration of at least one symptom. In certain embodiments, administration of a pharmaceutical composition to an animal results in an increase in functional CFTR protein in a cell. In certain embodiments, the administration of certain antisense oligonucleotides (ASOs) delays the onset of Cystic Fibrosis. In certain embodiments, the administration of certain antisense oligonucleotides prevents the onset of Cystic Fibrosis. In certain embodiments, the administration of certain antisense oligonucleotides rescues cellular phenotype.

[0469] While certain compounds, compositions and methods described herein have been described with specificity in accordance with certain embodiments, the following examples serve only to illustrate the compounds described herein and are not intended to limit the same. Each of the references, GenBank accession numbers, and the like recited in the present application is incorporated herein by reference in its entirety. Although the sequence listing accompanying this filing identifies each sequence as either “RNA” or “DNA” as required, in reality, those sequences may be modified with any combination of chemical modifications. One of skill in the art will readily appreciate that such designation as “RNA” or “DNA” to describe modified oligonucleotides is, in certain instances, arbitrary. For example, an oligonucleotide comprising a nucleoside comprising a 2′—OH sugar moiety and a thymine base could be described as a DNA having a modified sugar (2′—OH for the natural 2′—H of DNA) or as an RNA having a modified base (thymine(methylated uracil) for natural uracil of RNA).

[0470] Accordingly, nucleic acid sequences provided herein, including, but not limited to those in the sequence listing, are intended to encompass nucleic acids containing any combination of natural or modified RNA and/or DNA, including, but not limited to such nucleic acids having modified nucleobases. By way of further example and without limitation, an oligomeric compound having the nucleobase sequence

### Examples

[0471] The Examples that follow are illustrative of specific embodiments of the invention, and various uses thereof. They are set forth for explanatory purposes only, and are not to be taken as limiting the invention.

### Methods

[0472] Antisense Oligonucleotides (ASOs). ASOs with phosphorodiamidate morpholino (PMO) chemistries were generated by GeneTools LLC and were dissolved in 0.9% saline.

[0473] Cell culture and transfection. T84 cells are a human colonic adenocarcinoma cell line and the mouse primary cell line, 208EE, was established from an adult C57BL/6 mouse kidney. ASOs (15 μM final concentration) were transfected into cells using Endo-Porter (GeneTools). RNA was collected 48 hours post-transfection.

[0474] RNA isolation and analysis. RNA was isolated from tissue and cells in culture using TRIZOL™ reagent (Life Technologies, Carlsbad, CA) according to the manufacturer's protocol. For human tissue, RNA was isolated and treated with 4 μg of DNase-I (RNase-free) (Life Technologies) followed by reverse transcription with GoScript™ reverse transcription system (Promega, Madison, WI). Radiolabeled and cold PCR was carried out using primers specific for human or mouse CFTR region encompassing the ASO target exon. PCR products were separated by polyacrylamide or agarose gel electrophoresis and bands on gels were quantitated by densitometry analysis using Image J software.

### Example 1: Antisense Oligonucleotides Induce Skipping of Targeted Exons in Murine CFTR gene-derived pre-mRNA

[0475] Various ASOs (see Table 1; SEQ ID NOs: 1-60) were tested in the mouse primary cell line, 208EE (which was established from an adult C57BL/6 mouse kidney). ASOs (15 μM final concentration) were transfected into cells using Endo-Porter (GeneTools). FIGS. 1B, 1C and 1D demonstrate that ASOs induce skipping of targeted exons in murine CFTR.

TABLE 1
Antisense oligonucleotides targeting
mouse CFTR induce exon skipping.

| | Target | | % | |
|---|---|---|---|---|
| Name | Exon | Sequence (5′-3′) | skipped * | SEQ ID NO. |
| 2-1 | 2 | GGTCCAGCTAAAAGAGAAGAGGGCA | 92 | SEQ ID NO. 1 |
| 2-2 | 2 | CTTTCCTCAAAATTGGTGTGGTCCA | 16 | SEQ ID NO. 2 |
| 2-3 | 2 | TATGTCTGACAACTCCAAGTGGTGT | 46 | SEQ ID NO. 3 |
| 2-4 | 2 | CTAGTTTTTCAGACAAGTGGTCAGC | 65 | SEQ ID NO. 4 |
| 4-1 | 4 | TTCCTAGCAAGACAGGCTGGACAGC | nd | SEQ ID NO. 5 |
| 4-2 | 4 | ATAGGATGCTATGATTCTTCCTAGC | 23 | SEQ ID NO. 6 |
| 4-3 | 4 | ATAAGCCTATGCCAAGGTAAATGGC | 4 | SEQ ID NO. 7 |
| 4-4 | 4 | TGTCCTGACAATGAAGAGAAGGCAT | 87 | SEQ ID NO. 8 |
| 4-5 | 4 | AATGCGATGAAGGCCAAAAATAGCT | 78 | SEQ ID NO. 9 |
| 4-6 | 4 | TAGCTGTTCTCATCTGCATTCCAAT | 67 | SEQ ID NO. 10 |
| 4-7 | 4 | CATCTTCCAAAAAGTATTACCTTCT | nd | SEQ ID NO. 11 |
| 5-1 | 5 | TTGTTCAGGTTGTTGGAAAGAAGAC | 99 | SEQ ID NO. 12 |
| 5-2 | 5 | ATCAAGAACGCGGCTTGACAACTTT | 94 | SEQ ID NO. 13 |
| 7-1 | 7 | CACGAGTCTTTCATTGATCTTTGCA | 20 | SEQ ID NO. 14 |
| 7-2 | 7 | CTGATTCCCAACAATATGCCTTAAC | 26 | SEQ ID NO. 15 |
| 7-3 | 7 | CAATCATTTTCTCCATCGCTGATTC | 42 | SEQ ID NO. 16 |
| 7-4 | 7 | ATTATGTCAACTTACTCTCTCAAGT | 65 | SEQ ID NO. 17 |
| 9-1 | 9 | GCCTGTGGTCATTAAGTTATACTCC | 86 | SEQ ID NO. 18 |
| 9-2 | 9 | CTCCTCCCAAAATGCTGTTACATTT | 96 | SEQ ID NO. 19 |
| 9-3 | 9 | TATTTAGAAATCTCACCTCCTCCCA | 73 | SEQ ID NO. 20 |
| 10-1 | 10 | CTTTCTCCAGTAATTCCCCAAATCC | 0 | SEQ ID NO. 21 |
| 10-2 | 10 | GTCACCATTGCTTTGTTGTACTTTC | 51 | SEQ ID NO. 22 |
| 10-3 | 10 | CTGAAACTGACATTGTTCTCATCAC | 52 | SEQ ID NO. 23 |
| 10-4 | 10 | AGGATTTCCCACAAGGCAGAGATGA | 96 | SEQ ID NO. 24 |
| 10-5 | 10 | ATAGCCAACATCTCTCCTTTCTCTA | 0 | SEQ ID NO. 25 |
| 10-6 | 10 | CTTTCCTGATCCAGTAGATCCAGTA | 100 | SEQ ID NO. 26 |
| 10-7 | 10 | TTAAAGAGACAGTACCTTTCCTGAT | 71 | SEQ ID NO. 27 |
| 11-1 | 11 | TCCAGTTCTCCCAAAATCAACATCA | 19 | SEQ ID NO. 28 |
| 11-2 | 11 | TGTGCTTAATAATTCCCTCTGAAGC | 8 | SEQ ID NO. 29 |
| 11-3 | 11 | ATTGAGAGCAGAATGAAACTCTTCC | 16 | SEQ ID NO. 30 |
| 11-4 | 11 | GATATTTTCTTTGATAGTACCCGGC | 0 | SEQ ID NO. 31 |
| 11-5 | 11 | ACACTCTTATATCTGTACTCATCAT | 0 | SEQ ID NO. 32 |
| 11-6 | 11 | CTGCTGTAGTTGGCAAGCTTTGACA | 7 | SEQ ID NO. 33 |
| 11-7 | 11 | CATRAATATGCTTACCTGCTGTAGT | 0 | SEQ ID NO. 34 |
| 13-1 | 13 | GGGAATCTAATAGGTACAAATCAGC | 35 | SEQ ID NO. 35 |
| 13-2 | 13 | CAAATCAGCATCTTTATATACTGCT | 83 | SEQ ID NO. 36 |
| 13-3 | 13 | ACTCAGTCATAGAACATACCTTTCA | 93 | SEQ ID NO. 37 |
| 15-1 | 15 | AACAAACATACTTACCTCAACCAGA | 52 | SEQ ID NO. 38 |
| 20-1 | 20 | CCTGCCTGTAAATCATCCCATAGGA | 39 | SEQ ID NO. 39 |
| 20-2 | 20 | CAAGGTGGGTGAAAATTGGACTCCT | 25 | SEQ ID NO. 40 |
| 20-3 | 20 | CGAAGTGTCCAGAGTCCTTTTAAGC | 24 | SEQ ID NO. 41 |
| 20-4 | 20 | CAGAGTTTCAAAGTAAGTCTGGCGT | 98 | SEQ ID NO. 42 |
| 20-5 | 20 | TTGGCAGTGTGCAAATTCAGAGCTT | 74 | SEQ ID NO. 43 |
| 20-6 | 20 | CTATTCTCATTTGGAACCAGCGCAA | 58 | SEQ ID NO. 44 |
| 20-7 | 20 | AGAGGACAAATATCATGTCTATTCT | 0 | SEQ ID NO. 45 |
| 20-8 | 20 | ATGGAGATGAAGGTAACAACAATGA | 0 | SEQ ID NO. 46 |
| 22-1 | 22 | AACTTAAACACTCTGCTCACAGATC | 68 | SEQ ID NO. 47 |
| 22-2 | 22 | CTAAAACGTCAGATGATCCTTCTCT | 74 | SEQ ID NO. 48 |
| 22-3 | 22 | TATCACTTTTCTTCACATGCTCATT | 69 | SEQ ID NO. 49 |
| 22-4 | 22 | ACCATTTCGCCTCCAGAGGGCCAGA | 80 | SEQ ID NO. 50 |
| 22-5 | 22 | CATCCATGTATTTCACAGTAAGGTC | 42 | SEQ ID NO. 51 |
| 22-6 | 22 | ATGTTCTCTAATACGGCATTTCCAT | 0 | SEQ ID NO. 52 |
| 22-7 | 22 | CCTCTGTCCAGGACTTATTGAAAAA | 68 | SEQ ID NO. 53 |
| 22-8 | 22 | GTAATGCTGAAATCTCACCCTCTGT | 48 | SEQ ID NO. 54 |
| 23-1 | 23 | AATTCCATGAGACACCATCAATCTC | 80 | SEQ ID NO. 55 |
| 23-2 | 23 | GTACTTTTTCCTGATCCAGTTCTTC | 39 | SEQ ID NO. 56 |
| 23-3 | 23 | CATTTTTGTGCTCACCTGTGTTATC | 62 | SEQ ID NO. 57 |
| 24-1 | 24 | CATCTTTCCATTTTCCATTGGGATC | 36 | SEQ ID NO. 58 |
| 24-2 | 24 | CTCATCTGCAACTTTCCATATTTCT | 50 | SEQ ID NO. 59 |
| 24-3 | 24 | TATTTGTCATCCTTACCTCATCTGC | 67 | SEQ ID NO. 60 |

* percent of the mRNA transcripts that skip out the targeted exon

### Example 2: Antisense Oligonucleotides Induce Skipping of Targeted Exons in Human CFTR Gene-Derived Pre-mRNA

[0476] Various ASOs (see Table 2; SEQ ID NOs: 61-129) were tested in the human colonic adenocarcinoma cell line primary cell line, T84. ASOs (15 UM final concentration) were transfected into cells using Endo-Porter (GeneTools). FIGS. 2B, 2C, 2D and FIG. 3 demonstrate that ASOs induce skipping of targeted exons in human CFTR.

TABLE 2
Antisense oligonucleotides targeting
human CFTR induce exon skipping

| | Target | | % | |
|---|---|---|---|---|
| Name | Exon | Sequence (5′-3′) | skipped * | SEQ ID NO. |
| 2-1 | 2 | ATCCTTTCCTCAAAATTGGTCTGGT | 0 | SEQ ID NO. 61 |
| 2-2 | 2 | GTATATGTCTGACAATTCCAGGCGC | 35 | SEQ ID NO. 62 |
| 2-3 | 2 | CAGATAGATTGTCAGCAGAATCAAC | 18 | SEQ ID NO. 63 |
| 2-4 | 2 | GTACATGAACATACCTTTCCAATTT | 37 | SEQ ID NO. 64 |
| 4-1 | 4 | GAGGCTGTACTGCTTTGGTGACTTC | 77 | SEQ ID NO. 65 |
| 4-2 | 4 | GAAGCTATGATTCTTCCCAGTAAGA | 54 | SEQ ID NO. 66 |
| 4-3 | 4 | GTGTAGGAGCAGTGTCCTCACAATA | 0 | SEQ ID NO. 67 |
| 4-4 | 4 | AATGTGATGAAGGCCAAAAATGGCT | 39 | SEQ ID NO. 68 |
| 4-5 | 4 | GCTATTCTCATCTGCATTCCAATGT | 0 | SEQ ID NO. 69 |
| 4-6 | 4 | CCTGTGCAAGGAAGTATTACCTTCT | 0 | SEQ ID NO. 70 |
| 5-1 | 5 | CTAGAACACGGCTTGACAGCTTTAA | 58 | SEQ ID NO. 71 |
| 5-2 | 5 | TGGAAAGGAGACTAACAAGTTGTCC | 42 | SEQ ID NO. 72 |
| 7-1 | 7 | ACTGATCTTCCCAGCTCTCTGATCT | 15 | SEQ ID NO. 73 |
| 7-2 | 7 | ATTTCTGAGGTAATCACAAGTCTTT | 37 | SEQ ID NO. 74 |
| 7-3 | 7 | AGTATGCCTTAACAGATTGGATATT | 28 | SEQ ID NO. 75 |
| 7-4 | 7 | ATTTTTTCCATTGCTTCTTCCCAGC | 44 | SEQ ID NO. 76 |
| 7-5 | 7 | ATTGGAACAACTTACTGTCTTAAGT | 38 | SEQ ID NO. 77 |
| 9-1 | 9 | TCCATCACTACTTCTGTAGTCGTTA | 56 | SEQ ID NO. 78 |
| 9-2 | 9 | CTCCTCCCAGAAGGCTGTTACATTC | 53 | SEQ ID NO. 79 |
| 9-3 | 9 | TTAAAAATTCTGACCTCCTCCCAGA | 33 | SEQ ID NO. 80 |
| 10-1 | 10 | GGCTGTCATCACCATTAGAAGTTTT | 64 | SEQ ID NO. 81 |
| 10-2 | 10 | AATTACTGAAGAAGAGGCTGTCATC | 56 | SEQ ID NO. 82 |
| 10-3 | 10 | TAATATCTTTCAGGACAGGAGTACC | 49 | SEQ ID NO. 83 |
| 10-4 | 10 | GATCCAGCAACCGCCAACAACTGTC | 52 | SEQ ID NO. 84 |
| 10-5 | 10 | AGAACAAAAGAACTACCTTGCCTGC | 47 | SEQ ID NO. 85 |
| 11-1 | 11 | CTCCCATAATCACCATTAGAAGTGA | 2 | SEQ ID NO. 86 |
| 11-2 | 11 | ATTTTACCCTCTGAAGGCTCCAGTT | 2 | SEQ ID NO. 87 |
| 11-3 | 11 | ACAGAATGAAATTCTTCCACTGTGC | 2 | SEQ ID NO. 88 |
| 11-4 | 11 | GTGCCAGGCATAATCCAGGAAAACT | 14 | SEQ ID NO. 89 |
| 11-5 | 11 | ATGCTTTGATGACGCTTCTGTATCT | 2 | SEQ ID NO. 90 |
| 11-6 | 11 | TTTTCACATAGTTTCTTACCTCTTC | 72 | SEQ ID NO. 91 |
| 13-1 | 13 | TCTAGGTATCCAAAAGGAGAGTCTA | 90 | SEQ ID NO. 92 |
| 13-2 | 13 | GGTATTCAAAGAACATACCTTTCAA | 66 | SEQ ID NO. 93 |
| 15-1 | 15 | ACAATAGAACATTCTTACCTCTGCC | 93 | SEQ ID NO. 94 |
| 16-1 | 16 | TCGTTATTTGGCAGCCAAAGTTACT | n/a | SEQ ID NO. 95 |
| 16-2 | 16 | GAGCCACAGCACAACCAAAGAAGCA | n/a | SEQ ID NO. 96 |
| 16-3 | 16 | TCCAAGGAGCCACAGCAC | n/a | SEQ ID NO. 97 |
| 16-4 | 16 | TTCCAAGGAGCCACAGCA | n/a | SEQ ID NO. 98 |
| 16-5 | 16 | TTCCAAGGAGCCACAGCACAACCAA | n/a | SEQ ID NO. 99 |
| 16-6 | 16 | AACAGAAATAAAACACAATCTACAC | n/a | SEQ ID NO. 100 |
| 16-7 | 16 | TTTCCAAGGAGCCACAGCACAACCA | 0 | SEQ ID NO. 101 |
| 16-8 | 16 | ACAATCTACACAATAGGACATGGAA | 56 | SEQ ID NO. 102 |
| 16-9 | 16 | CACAATCTACACAATAGGACATGGA | n/a | SEQ ID NO. 103 |
| 16-10 | 16 | ACACAATCTACACAATAGGACATGG | n/a | SEQ ID NO. 104 |
| 16-11 | 16 | GACTTTTTTTCTAACATCTTCACCT | n/a | SEQ ID NO. 105 |
| 16-12 | 16 | ATGGAACAACACACAGTTGATTTTT | n/a | SEQ ID NO. 106 |
| 16-13 | 16 | ATCGAACAAGACACAGTTGATTTTT | n/a | SEQ ID NO. 107 |
| 16-14 | 16 | GAGTGGAACAAGACACAGTTGATTT | n/a | SEQ ID NO. 108 |
| 16-15 | 16 | CACAATCTACACAATAAGACATGGA | n/a | SEQ ID NO. 109 |
| 20-1 | 20 | CAAGATGAGTGAAAATTGGACTCCT | 2 | SEQ ID NO. 110 |
| 20-2 | 20 | CGAAGGCACGAAGTGTCCATAGTCC | 29 | SEQ ID NO. 111 |
| 20-3 | 20 | AACAGAGTTTCAAAGTAAGGCTGCC | 8 | SEQ ID NO. 112 |
| 20-4 | 20 | AGTTGGCAGTATGTAAATTCAGAGC | 6 | SEQ ID NO. 113 |
| 20-5 | 20 | TTCTATTCTCATTTGGAACCAGCGC | 45 | SEQ ID NO. 114 |
| 20-6 | 20 | GGTAACAGCAATGAAGAAGATGACA | 35 | SEQ ID NO. 115 |
| 22-1 | 22 | ATGTCAATGAACTTAAAGACTCGGC | 59 | SEQ ID NO. 116 |
| 22-2 | 22 | GGCCAGATGTCATCTTTCTTCACGT | 65 | SEQ ID NO. 117 |
| 22-3 | 22 | ATCTTTGACAGTCATTTGGCCCCCT | 7 | SEQ ID NO. 118 |
| 22-4 | 22 | CCACCTTCTGTGTATTTTGCTGTGA | 45 | SEQ ID NO. 119 |
| 22-5 | 22 | TCTCTAATATGGCATTTCCACCTTC | 67 | SEQ ID NO. 120 |
| 22-6 | 22 | CCAGGACTTATTGAGAAGGAAATGT | 37 | SEQ ID NO. 121 |
| 22-7 | 22 | AAGCAGTGTTCAAATCTCACCCTCT | 63 | SEQ ID NO. 122 |
| 23-1 | 23 | ATCCAGTTCTTCCCAAGAGGCCCAC | 0 | SEQ ID NO. 123 |
| 23-2 | 23 | AGCTGATAACAAAGTACTCTTCCCT | 0 | SEQ ID NO. 124 |
| 23-3 | 23 | AAGTTATTGAATCCCAAGACACACC | 0 | SEQ ID NO. 125 |
| 23-4 | 23 | CTAAGTCCTTTTGCTCACCTGTGGT | 24 | SEQ ID NO. 126 |
| 24-1 | 24 | GATCACTCCACTGTTCATAGGGATC | 58 | SEQ ID NO. 127 |
| 24-2 | 24 | CTCATCTGCAACTTTCCATATTTCT | 53 | SEQ ID NO. 128 |
| 24-3 | 24 | ATTTCAGTTAGCAGCCTTACCTCAT | 66 | SEQ ID NO. 129 |

* percent of the mRNA transcripts that skip out the targeted exon

### Example 3: HCAI-CFTR Deletions in Fischer Rat Thyroid Cells

[0477] Fischer Rat Thyroid (FRT) cells, which lack functional CFTR, were stably transfected with nucleic acids encoding human CFTR with deletions of exon 2, 4, 5, 7, 9, 10, 13, 15, 23, or 24 (HCAIΔcx2. HCAIΔcx4, HCAIΔcx5, HCAIΔcx7. HCAIΔcx9. HCAIΔcx10. HCAIΔcx13. HCAIΔcx 15 HCAIΔcx23, or HCAIΔcx24). FRT cells stably the HCAI-CFTR exon deletions were seeded onto HTS Transwell®-24 well permeable filter plates (0.4 μM pore size, Polyester, Corning) and differentiated for 2 weeks. Transepithelial conductance was assessed in Gt assays that were performed 14 days after cell seeding. The data were recorded with 24-channel transepithelial current clamp (TECC)_Robot system (Design, Belgium). HCAI-CFTR activity was measured by the change in Gt upon stimulation with forskolin (10 μM). CFTRInh-172 (10 μM) was used to confirm CFTR dependence. A comparison of the AUC forskolin-stimulated HCAI-CFTR exon deletion channel activity to HCAI empty vector is shown in FIG. 18A (error bars represent SEM; * p<. 05, *** p<. 001, n=4, two-tailed t-test compared to HCAI empty vector). Representative Gt traces of CFTR exon 4, exon 7, exon 23, and exon 24 deletion constructs in comparison to HCAI empty vector are shown in FIG. 18B.

### Example 4: Antisense Oligonucleotides Induce Exon Skipping of Exons with Nonsense Mutations in CFTR In Vivo and Restore the CFTR Reading Frame

[0478] ASO 5-1 (SEQ ID NO:12) was tested in mice and shown to induces CFTR exon 5 skipping. Intracerebroventricular (ICV) injection of mCFex5-1 was performed in wild-type mice (C57BI/6) on post-natal day 2, and mice were euthanized on post-natal day 12. RNA was collected from the hippocampus. Radioactive RT-PCR of CFTR RNA isolated from hippocampus is shown in FIG. 19A (splice isoforms are labeled and exon 5 skipping quantification is shown at the bottom). A quantitation of the RT-PCR analysis of the RNA exon 5 skipping induced by ASO 5-1 treatment is shown in FIG. 19B.

### Example 5: Antisense Oligonucleotides to Correct CFTR 2789+5 G>a Splicing Mutation

[0479] Antisense oligonucleotides were designed that increase correct splicing in 2789+5 G>A in patient lymphoblast cells lines. The lymphoblast cell line 11859, which is homozygous for the 2789+5 G>A mutation, was transfected with ASOs that were designed to correct the splicing in CFTR 2789+5 G>A (ASO concentration of 15μM; and cells were treated for 48 hours). Correction of CFTR splicing in 2789+5 the lymphoblasts using ASOs is shown in FIG. 20B (CFTR spliced isoforms are labeled; T84 cells were analyzed as a positive control for wild-type CFTR splicing). A quantitation of the RT-PCR analysis of the RNA splice correction induced by ASO treatment in patient lymphoblast cells is shown in FIG. 20C. A summary of the 2789+5 ASOs targets, sequences, and correction activity in patient lymphoblast cells is shown in Table 3.

TABLE 3
ASO sequences tested in the 2789 + 5
lymphoblast cell line.

| | Target | Sequence (5′ to 3′) | % Full |
|---|---|---|---|
| Name | Region | (SEQ ID NO.) | Length |
| 16-11 | Intron 15 | GACTTTTTTTCTAACATCTTCACCT | 47 |
| | | (SEQ ID NO.: 105) | |
| 16-12 | Intron 15 | ATGGAACAACACACAGTTGATTTTT | 39 |
| | | (SEQ ID NO.: 106) | |
| 16-13 | Intron 15 | ATCGAACAAGACACAGTTGATTTTT | 34 |
| | | (SEQ ID NO.: 107) | |
| 16-14 | Intron 15 | GAGTGGAACAAGACACAGTTGATTT | 31 |
| | | (SEQ ID NO.: 108) | |
| 16-9 | Exon 16 | CACAATCTACACAATAAGACATGGA | 35 |
| | | (SEQ ID NO.: 109) | |
| 16-2 | Exon 16 | GAGCCACAGCACAACCAAAGAAGCA | 34 |
| | | (SEQ ID NO.: 96) | |
| 16-5 | Exon 16 | TTCCAAGGAGCCACAGCACAACCAA | 48 |
| | | (SEQ ID NO.: 99) | |
| 16-7 | Exon 16 | TTTCCAAGGAGCCACAGCACAACCA | 22 |
| | | (SEQ ID NO.: 101) | |
| 16-3 | Exon 16 | TCCAAGGAGCCACAGCAC | 52 |
| | | (SEQ ID NO.: 97) | |
| 16-4 | Exon 16 | TTCCAAGGAGCCACAGCA | 42 |
| | | (SEQ ID NO.: 98) | |
| 16-8 | Intron 16 | ACAATCTACACAATAGGACATGGAA | 15 |
| | | (SEQ ID NO.: 102) | |
| 16-9 | Intron 16 | CACAATCTACACAATAGGACATGGA | 52 |
| | | (SEQ ID NO.: 103) | |
| 16-10 | Intron 16 | ACACAATCTACACAATAGGACATGG | 51 |
| | | (SEQ ID NO.: 104) | |
| 16-6 | Intron 16 | AACAGAAATAAAACACAATCTACAC | 47 |
| | | (SEQ ID NO.: 100) | |
| 16-1 | Intron16 | TCGTTATTTGGCAGCCAAAGTTACT | 42 |
| | | (SEQ ID NO.: 95) | |

### Example 6: Antisense Oligonucleotides to Correct CFTR 3272-26 A>G Splicing Mutation

[0480] Antisense oligonucleotides were designed that increase correct splicing in 3272-26 A>G mutation in patient lymphoblast cell lines. The lymphoblast cell line 18801 (18801 is from a male donor with one allele carrying the 3272-26 A>G mutation, and no mutation was identified in the second allele) was transfected with ASOs that were designed to correct splicing in CFTR 3272-26 A>G (ASOs were transfected with Endo-Porter, the ASO concentration was 15 μM, and cells were treated for 48 hours). Correction of CFTR splicing in CFTR 3272-26 A>G in the lymphoblast cells using ASOs is shown in FIG. 21B (CFTR spliced isoforms are labeled; T84 cells were analyzed as a positive control for wild-type CFTR splicing). A summary of the CFTR 3272-26 A>G ASOs targets, sequences, and correction activity in patient lymphoblast cells is shown in Table 4.

TABLE 4

| | Target | Sequence (5′ to 3′) | % Full- |
|---|---|---|---|
| Name | Exon | (SEQ ID NO.) | Length |
| 20-1 | 20 | CAAGATGAGTGAAAATTGGACTCCT | 60 |
| | | (SEQ ID NO.: 110) | |
| 20-2 | 20 | CGAAGGCACGAAGTGTCCATAGTCC | 3 |
| | | (SEQ ID NO.: 111) | |
| 20-3 | 20 | AACAGAGTTTCAAAGTAAGGCTGCC | 50 |
| | | (SEQ ID NO.: 112) | |
| 20-4 | 20 | AGTTGGCAGTATGTAAATTCAGAGC | nd |
| | | (SEQ ID NO.: 113) | |
| 20-5 | 20 | TTCTATTCTCATTTGGAACCAGCGC | 56 |
| | | (SEQ ID NO.: 114) | |
| 20-6 | 20 | GGTAACAGCAATGAAGAAGATGACA | 12 |
| | | (SEQ ID NO.: 115) | |

### Example 7: Antisense Oligonucleotides to Correct CFTR 3849+10 kb C>T Splicing Mutation

[0481] Antisense oligonucleotides were designed to repair the 3849+10 kb C>T splice mutation and restore CFTR function. The C>T mutation creates a cryptic 5′ splice site that results in the inclusion of an 84 bp insert from intron 22, and the mutated allele produces both wild-type and aberrantly spliced transcripts. The lymphoblast cell line 18860 (18860 is homozygous for 3849+10 kb CFTR mutation) was transfected with ASOs that were designed to correct splicing in 3849+10 kb C>T (ASOs were transfected with Endo-Porter, the ASO concentration was 15 μM, and cells were treated for 48 hours). Correction of CFTR splicing in 3849+10 kb C>T in the lymphoblast cells using ASOs is shown in FIGS. 22B and 22C (CFTR spliced isoforms are labeled; T84 cells were analyzed as a positive control for wild-type CFTR splicing). A summary of the CFTR 3849+10 kb C>T ASO target, sequence, and correction activity in patient lymphoblast cells is shown in Table 5.

TABLE 5

| | Target | Sequence (5′ to 3′) | % Full- |
|---|---|---|---|
| Name | Exon | (SEQ ID NO.) | Length |
| ASO-+10kb | Intron | CCTTTCAGGGTGTCTTACTCAC | 93 |
| | 22 | CAT (SEQ ID NO.: 150) | |

### Example 8. Analyzing CFTR Function in Patient Epithelial Cells Treated with ASOs

[0482] Primary patient human bronchial epithelial (HBE) cells (cells are compound heterozygotes with the 3849+10kbC>T and ΔF508 mutation) were seeded on HTS Transwell®-24 well permeable filter plates (0.4 μM pore size, Polyester, Corning) and switched to air/liquid interphase after 3 days. Ieq measurements were carried out 99 days after seeding. Cells were treated basolaterally with C18 (Corr951/VX-661, 6 μM) or DMSO (0.1%), and apically transfected with ASO-+10 kb (SEQ ID NO:150 at 20 μM or 80 μM) or ASO-C(20 μM or 80 μM: 5′ CCTCTTACCTCAGTTACAATTTATA 3′-SEQ ID NO:151) 4 days before Ieq measurements were taken. C18 is a corrector compound that improves F508del-CFTR folding and function. Cells were transfected using EGTA (4 mM) and Endo-Porter (GeneTools) for 10 hours, then EGTA was taken off and the cells were transfected again using Endo-Porter in the absence of EGTA. The data were recorded with 24-channel transepithelial current clamp (TECC) Robot system (Design, Belgium). Sodium current was inhibited by benzamil (6 μM) and CFTR activity was measured by the change in Ieq upon stimulation with forskolin (10 μM) and VX-770/KALYDECO™/Ivacaftor (1 μM), which is a CFTR potentiator that improves the transport of chloride through the CFTR channel. Inhibition with bumetanide/BUMEX™/BURINEX™ (20 μM) was used to confirm CFTR dependence.

[0483] The results demonstrate that ASO-+10 kb (SEQ ID NO: 150) rescues CFTR function similar to Con951/VX-661 (CFTR corrector 106951 (1-(benzo[d][1.3]dioxol-5-yl)-N-(5-((S)-(2-chlorophenyl) ((R)-3-hydroxypyrrolidin-1-yl)methyl) thiazol-2-yl) cyclopropanecarboxamide)) in patient HBE cells. As shown in FIG. 23. ASO-+10 kb rescues CFTR function similar to Corr951 in patient HBE cells. FIG. 23A is a graph showing the area under the curve (AUC) of time from forskolin+VX-770-stimulation of CFTR channels following indicated treatment (error bars represent SEM; two-tailed t-test, n=2). FIG. 23B depicts representative Ieq traces of treatment (Corr951 or ASO-+10 kb) compared to control (ASO-C, top, or DMSO, bottom).

[0484] Additionally, the results show that ASO-+10 kb (SEQ ID NO: 150) increases WT splicing in 3849+10 kb patient HBE cells. Primary patient HBE cells are heterozygous for the 3849+10kbC>T mutation were transfected with ASO-+10 kb (20 μM). Total mRNA was isolated, reverse transcribed, and analyzed for splice correction using SYBER™ Green quantitative PCR. FIG. 24A depicts the primer sets used to analyze splice correction by ASO-10+kb (primer set A-B is designed to amplify ASO corrected WT isoform splicing specific to the splice mutant allele, and primer set C-D is designed to analyze the amount of uncorrected mutant splicing). FIG. 24B shows a quantification of total mRNA transcribed from the CFTR 3849+10 KB allele, and indicates an increase with ASO-+10 kb treatment (A-B primer set). FIG. 24C shows a quantification of mutant, cryptically spliced mRNA isoform, and shows decrease of aberrant mRNA with ASO-+10 kb treatment (C-D primer set).

### Example 9. Open Reading Frame Correction Using Antisense Oligonucleotides for the Treatment of Cystic Fibrosis

[0485] CFTR gene mutations that introduce premature termination codons account for ˜10% of cystic fibrosis cases. This mutation type is associated with a severe form of the disease, typically a consequence of low CFTR mRNA levels resulting from degradation by nonsense mediated mRNA decay (NMD), and production of a truncated, non-functional CFTR protein. Current therapeutics for CF are less effective in patients with these types of mutations, likely due to the instability of the mRNA and lack of the natural C-terminal portion of the protein. Antisense technology is one promising therapeutic strategy for these types of mutations that has not been widely explored for the disease. Splice-switching antisense oligonucleotides (ASOs) can be designed to modify gene expression by directly modulating pre-mRNA splicing. ASO-mediated skipping of exons to restore the open reading frame of RNA with frameshift mutations or premature termination codons (PTC) has been successfully applied to treat a number of disorders. This Example shows that CFTR lacking the amino acids encoding exon 23 retains the ability to conduct chloride. The functionality of this CFTR isoform is enhanced by corrector and modulator drugs currently in use clinically to treat certain CFTR mutations. ASO-induced exon 23 skipping in an immortalized bronchial epithelial cell line expressing CFTR W1282X results in a dose-dependent increase in CFTR mRNA and a corresponding recovery of chloride channel activity. These results support the use of ASOs in treating CF patients with rare CFTR class I mutations in exon 23 that result in unstable CFTR mRNA and truncations of the CFTR protein.

[0486] To date, approximately 2,000 CF-associated variants in CFTR have been identified with variable prevalence and disease severity. Current therapeutics approved and in development focus on specific patient subpopulations with the most common mutations in classes II and III. Currently, there are only four FDA approved drugs that directly target CFTR dysfunction. Of these, ivacaftor potentiates function of CFTR by increasing the probability of channel opening to increase anion ion conductance of CFTR gating variants, lumacaftor and tezacaftor act as chemical chaperones to correct processing and trafficking of CFTR to the cell surface, and a new corrector, elexacaftor, works in combination with tezacaftor and ivacaftor. There is a critical need for therapies for patients with rare CFTR mutations, in particular nonsense variants that create a premature termination codon and thereby a truncated protein.

[0487] Gene mutations that result in PTCs are challenging to treat because they not only encode a truncated protein product, by virtue of the early termination, but the mRNA intermediate is often a target of nonsense-mediated mRNA decay (NMD), a cellular quality-control mechanism whereby mRNA with PTCs are degraded. Thus, PTCs result in lower protein expression and the production of a truncated protein from the limited amount of translated variant mRNA. Current approaches in the development of treatments for PTCs involve screening for molecules that stabilize the mRNA transcripts, that is block NMD, and also increase translational read-through of PTCs to recover full-length protein expression. Another approach to treating disease associated with PTCs is to eliminate the PTC by inducing skipping of the exon encoding the variant. This approach requires skipping of the exon to retain the proper reading frame. This so-called reading frame correction has shown promise as a therapeutic approach in the FDA-approved splice-switching antisense oligonucleotides (ASOs) targeting PTCs in Duchenne's Muscular Dystrophy.

[0488] The second most common CF-associated nonsense mutation is W1282X, located in exon 23. This nonsense mutation truncates CFTR at amino acid 1281 (CFTR1281), removing ˜60% of the nucleotide binding domain 2 (NBD2) but retaining most of the full-length protein (1281 vs 1480 amino acids). The truncated protein may have processing and/or gating defects as an increase in channel function can be achieved in W1282X-CFTR cells by potentiator and corrector treatment. Because of the premature termination codon created by the mutation, W1282X-CFTR mRNA is subjected to NMD, leading to a decrease in mRNA and consequently protein abundance and thereby limiting the effectiveness of protein modulator drugs. Small molecule compounds that inhibit NMD have been shown to increase W1282X-CFTR expression but to date no effective drug candidates targeting NMD have been clinically approved.

[0489] Another approach to stabilizing W1282X-CFTR is to eliminate the PTC by using an ASO that induces the exclusion of exon 23 during the process of pre-mRNA splicing. Such skipping of exon 23 results in the production of a CFTR mRNA with an intact open-reading frame with a deletion of the 52 amino acids encoded by the exon. This strategy may have a therapeutic benefit not only by producing a potentially more functional protein isoform with a restored C-terminus, as suggested by biochemical and functional studies of CFTR, but also by stabilizing and increasing protein expression from the allele, and thereby improving efficacy of current FDA-approved CF therapeutics as well as other potentiators that are effective for mutations in NBD2.

[0490] ASOs are a promising therapy in personalized treatment to modulate pre-mRNA splicing to induce skipping of target exons. ASOs are short, oligonucleotides modified in their sugar and back-bone structure to be stable and specific, with long lasting effects on splice modulation over time. Recent FDA approval of ASOs for a number of diseases exemplifies their therapeutic potential. Specific to the CF field, aerosolized delivery of antisense oligonucleotides has shown to be effective making ASO treatment delivered directly to the airways of CF patients a promising approach. Unlike other antisense therapies in development for CF that target other ion channels involved in the epithelial fluid secretory process, the ASO approach disclosed herein will provide a therapy for class I mutations by targeting the underlying defect in the CFTR gene. Despite recent advances in CFTR drug development, where currently ˜90% of CF patients are eligible for CF drug therapy, ASO treatment provides a potential therapeutic for CF patients with rare stop mutations that results in severe forms of the disease, further closing this therapeutic gap for CF patients left behind.

[0491] This Example demonstrates that skipping of exon 23 rescues CFTR mRNA expression disrupted by the PTC and produce a CFTR isoform with partial function that is responsive to CFTR modulators. As shown herein, expressing CFTR-Δ23, with deletion of exon 23, in Fischer rat thyroid (FRT) cells, which lack endogenous CFTR, has residual CFTR function as assessed by forskolin-induced conductance. This activity is further stimulated by treatment with recently FDA-approved CFTR modulators. Furthermore, ASO-mediated exon 23 skipping of W1282X-CFTR RNA in an immortalized human W1282X-CFTR bronchial epithelial cells line increases overall CFTR mRNA levels and recovers channel activity as measured by forskolin-induced conductance. The combination of ASO treatment with CFTR modulator treatment, which is the current standard of care for these patients, results in CFTR activity that is greater than either treatment alone. Together, these results suggest that ASO-induced exon 23 skipping in CF cases caused by nonsense mutations in the exon, is a promising therapeutic adjuvant.

### Materials and Methods

[0492] Generation of exon deletion constructs: CFTR-Δex23 was created from the synthetic CFTR high codon adaption index (HCAI) construct subcloned in the pcDNA3.1/Neo (+) vector (Shah et al. 2015) using the Q5 Site-Directed Mutagenesis Kit (NEB) with primers flanking exon 23 (Table 6). The plasmid was sequenced to confirm complete exon deletion and an intact reading frame and then stably transfected into Fischer Rat Thyroid (FRT) cells using lipofectamine LTX (Thermo Fisher) and OptiMEM (Thermo Fisher) on 6-well plates for 48 hours. Cells were transferred to T75 flasks and clonal cell lines were selected with G418 (300 μg/ml) for one week. After selection, cells were maintained in media supplemented with G418 (150 μg/ml).

[0493] Cells and culture conditions: FRT cell lines were cultured in F12 Coon's modification media (Sigma. F6636) supplemented with 10% FBS and 1% Penicillin-Streptomycin (PenStrep). 16hBEge-W1282X-CFTR cell lines were obtained from the Cystic Fibrosis Foundation (CFF) and cultured according to their instructions in MEM media (Gottschalk et al. 2016; Valley et al. 2019). Single-cell clones of the 16hBEge-W1282X-CFTR cell lines were isolated and selected for high resistance. Two clonal cell lines. 3F2 and 9A6, were used for functional analysis. For functional analysis. FRT cells and 16hBE-W1282X-CFTR clones were plated on Costar 24-well high-throughput screening filter plates (0.4 μM pore size, Polyester, Corning, catalog #CLS3397) and grown in a liquid/liquid interface (180 μl apical/700 μl basolateral) in a 37° C. incubator with 90% humidity and 5% CO₂ for 1 week. Media was replaced 3 times a week.

[0494] Antisense oligonucleotides: Splice-switching antisense oligonucleotides are 25-mer phosphorodiamidate morpholino oligomers (Gene-Tools, LLC) (Table 6). ASO-23-4 (SEQ ID NO: 126) induces skipping of exon 23. ASO-23-3 (SEQ ID NO: 125) blocks a cryptic 5′ splice site partially activated by ASO-23-4. A non-targeting ASO was used as a negative control. ASO-C. (Gene Tools, standard control oligo). ASOs were formulated in sterile water.

[0495] ASO cell transfection: The 16HBEge-W1282X-CFTR clonal cell line was transfected on filter plates 4 days post plating. Cells were transfected with ASOs apically in 100 μl of complete MEM media with Endo-Porter (6 μl/ml; Gene-Tools) at indicated concentrations for 48 hours (Summerton 2005). After transfection, the media was removed and replaced with media containing VX-661 (3 μM) and VX-445 (1 μM) or DMSO (0.2%) for 24 hours until functional analysis. For the functional analysis the media was removed and replaced with HEPES-buffered Coon's F12 media.

[0496] RNA isolation and RT-PCR: RNA was extracted from cells using TRIzol according to manufacturer instructions (Thermo Fisher Scientific). Reverse transcription was performed on total RNA using the GoScript Reverse Transcription System with an oligo-dT primer (Promega). Splicing was analyzed by radiolabeled PCR of resulting cDNA using GoTaq Green (Promega) supplemented with α-³²P-deoxycytidine triphosphate (dCTP). Primers for amplification are reported in Table 6 and include primer sets flanking the deleted HCAI-CFTR exon 23. (hCFTRx22F. hCFTRex24R) and primers for human-actin analyzed as a control (hβ-actinFor, hβ-actinRev). Reaction products were run on a 6% non-denaturing polyacrylamide gel and quantified using a Typhoon 7000 phosphorimager (GE Healthcare) or ImageJ software.

[0497] Real-time qPCR: Real-time qPCR was performed with Prime Time Gene Expression Master Mix and PrimeTime qPCR probe assay kits human non-F508del-CFTR (IDT, hCFTR-F508) transcripts normalized to human β-actin (IDT. HsPT.39a.2214847) (Table 9). All reactions were analyzed in triplicate on 96-well plates and averaged together to comprise one measurement. Real-time PCR was performed on an Applied Biosystems (ABI) ViiA 7 Real-Time PCR System with the thermal-cycling protocol: stage 1-50° C. for 2 min. 95° C. for 3 min; stage 2-40 cycles of 95° C. for 15 s. 60° C. for Imin to ensure an amplification plateau was reached. Results were analyzed by the ΔΔCT method (Livak and Schmittgen 2001).

[0498] Protein isolation and automated immunoblot (western) analysis: Cell lysates for immunoblot analysis were prepared for functional analysis using NP-40 lysis buffer (1% Igepal. 150 mM NaCl. 50 mM Tris-HCl pH7.6) supplemented with 1x protease inhibitor cocktail (Sigma-Aldrich, cat #11836170001). Protein concentration was measured using a Coomassie (Bradford) protein assay (Thermo Fisher, cat #23200). Cell lysates were prepared and diluted to 1 mg/ml using the sample preparation kit (Protein Simple) for an automated capillary western blot system. WES System (Protein Simple) (Harris 2015; Kannan et al. 2018). Cell lysates were mixed with 0.1x sample buffer and 5x fluorescent master mix for a final protein lysate concentration of 0.2 mg/ml. Samples were incubated at room temperature for 20 minutes and then combined with biotinylated protein size markers, primary anti-CFTR antibodies 432 (Riordan lab UNC. Cystic Fibrosis Foundation, diluted 1:100 with milk-free antibody diluent), anti-β-actin (C4. Santa Cruz Biotechnology, diluted 1:50 with milk-free antibody diluent), horseradish peroxidase (HRP)-conjugated secondary antibodies, chemiluminescence substrate and wash buffer and dispensed into respective wells of the assay plate and placed in WES apparatus. Samples were run in triplicate. Signal intensity (area) of the protein was normalized to the peak area of the loading control C4. β-actin. Quantitative analysis of the CFTR B and C-bands was performed using Compass software (Protein Simple).

[0499] Automated conductance assay: Stably transfected FRT cells were treated with the corrector C18 (6 μM) (VRT-534. VX-809/lumacaftor analog). VX-445+VX-661 (3 μM+1 μM final concentration) or vehicle (0.1% or 0.2% DMSO) at 37° C. 16hBEge-W1282X-CFTR clones were treated similarly with VX-445+VX-661 (3 μM+1 μM) or vehicle (0.2% DMSO) (Eckford et al. 2014). Twenty-four hours later the cells were switched from growth media to HEPES-buffered (pH 7.4) F12 Coon's modification media (Sigma, F6636) apically and basolaterally and allowed to equilibrate for one hour at 37° C. without CO₂. To obtain the conductance measurements, the transepithelial resistance was recorded at 37° C. with a 24-channel TECC robotic system (EP Design, Belgium) as previously described (Vu et al. 2017). Briefly, for the FRT cells, baseline measurements were taken for ˜20 minutes. Forskolin (10 μM) was added to the apical and basolateral sides and measurements were recorded for 20 minutes. The cells were then treated apically and basolaterally with potentiator. VX-770 (1 μM), and measurements were taken for an additional 20 minutes. The cells were then treated with an inhibitor of CFTR, Inh-172 (20 μM), on the apical and basolateral sides for 30 minutes. The 16hBEge-W1282X-CFTR clone was measured similarly with the exception that forskolin and VX-770 were added to the cells at the same time. Measurements were taken at two-minute intervals (10 measurements/addition). Gt was calculated by the reciprocal of the recorded Rt (Gt=1/Rt), after Rt was corrected for solution resistance (Rs), and plotted as conductance traces. To estimate average functional response trajectories during each test period, area under the curve measurements of forskolin and forskolin+VX-770 were calculated using a one-third trapezoidal rule for the entirety of each test period using Excel. The average of two identically treated wells was calculated for each plate to obtain one biological replicate used in the final mean±SEM graphed for each exon deletion.

[0500] Statistics: Statistical analyses were performed using GraphPad PRISM 8.2.1 or Microsoft Excel. A two-tailed one-sample t-test was used to assess significant changes of one test-group normalized to a control. One-way ANOVA analysis with a post-hoc test (Tukey's) was used to assess significant differences when comparing more than two groups. Two-way ANOVA analysis was used when comparing two independent variables with a post-hoc test (Tukey's) to assess significant differences between and within groups. When assessing significance differences within groups of paired data Sidak's post-hoc test was used. The specific statistical test used in each experiment can be found in the associated figure legend.

### Results

[0501] Deletion of CFTR exon 23 results in a partially functional CFTR isoform that is responsive to current CF modulators: To test the function of CFTR protein lacking amino acids encoded by exon 23, a CFTR cDNA deletion construct (CFTR-Δex23) was created, and CFTR expression and function was analyzed after stable transfection in FRT cells. A CFTR cDNA plasmid designed for high expression using a high codon adaption index for codon selection (HCAI) was used to improve exogenous CFTR expression. Exon 23 deletion in the mRNA was confirmed via RT-PCR (FIG. 25A, 25B).

[0502] To analyze retained CFTR function, transfected FRT cells were plated on transwell filter plates and grown 7 days to confluent monolayers. Semi-functional CFTR isoforms are expected to be responsive to modulator treatment and because current CF therapeutics include combination treatment with CF modulators, the cells were treated with C18, an analog of the corrector VX-809/lumacaftor, for 24 hours, and the potentiator VX-770 after forskolin addition to test if CFTR-Δex23 activity could be further improved. Transepithelial resistance measurements were recorded from the monolayers to calculate transepithelial conductance (Gt=1/Rt) responses attributed to forskolin-stimulated activation of CFTR and inhibition by Inh-172, a specific inhibitor of CFTR. Measurements were plotted as conductance traces (FIG. 25C). CFTRΔex23 did not have significant conductance without modulator treatment but had a significant (p<. 0.0001) increase in forskolin-induced conductance compared to cells transfected with the empty vector (white bars) as measured by the area under the curve per minute of the 20 minute test periods, with C18+VX-770 treatment (FIG. 25D) (AUC/min: empty vector=0.032+0.015 mS/cm². CFTR-Δ23=0.592=0.181 mS/cm²).

[0503] Previous studies have reported that stable expression of CFTR1281 results in a semi-functional CFTR protein that can be corrected by CF modulator treatment and that VX-770 treatment is effective for some patients homozygous with the W1282X mutation (Haggie et al. 2017; Mutyam ct al. 2017). To compare CFTR-Δ23 activity with truncated CFTR W1282X activity. FRT cells were transfected with a plasmid expressing CFTR W1282X and CFTR expression and function was analyzed (FIG. 25). CFTR-W1282X retained some CFTR function that was further improved with C18 and VX-770 treatment. CFTR-W1282X activity was similar to that of CFTR-Δ23 expression, which also provided significant (p<0.0001) conductance with combined modulator treatments, when compared to the empty vector (FIG. 25C, 25D) (AUC/min: empty vector=0.111+0.022 mS/cm². CFTR-Δ23=0.951+0.187 mS/cm². CFTR-W1282X=0.880+0.127 mS/cm²). Treatment with the corrector C18 also had a similar effect with both W1282X and Δex23 expression and also increased the abundance of the mature CFTR band C (FIG. 25D). Immunoblot analysis of CFTR protein isolated from cells after functional analysis verified expression of CFTR in the cells as indicated by the presence of mature Band C, which is elevated by treatment with C18, as expected, and immature Band B (FIG. 25E, 25F).

[0504] To further assess the retained function in CFTR-Δ23 cells were treated with the two newly FDA-approved CF correctors. VX-661+VX-445 (FIG. 25G). Treatment with the triple modulator combination (VX-661. VX-445. VX-770) resulted in superior improvement of CFTR conductance, representing ˜20% of WT-CFTR function (FIG. 25H), providing evidential support that elimination of this exon retains function that is rescued further by CF modulators. Importantly, as these constructs encode CFTR cDNA, the effect of the PTC introduced by W1282X-CFTR on mRNA stability is not addressed by this assay.

[0505] ASO-induced exon 23 skipping increases CFTR mRNA and recovers chloride channel activity in a CFTR W1282X immortalized human bronchial epithelial cell line. A major disease mechanism of the CFTR W1282X mutation is mRNA destabilization of due to targeting of the PTC-containing mRNA for degradation by the nonsense mediated decay pathway (FIG. 26A middle panel). Results with CFTR-Δ23 expression in FRT cells show that the isoform retains some CFTR function. An ASO designed to induce CFTR exon skipping and eliminate the PTC, could increase CFTR mRNA abundance resulting in translation of more semi-functional CFTR protein that would be responsive to further rescue by CF modulator drugs (FIG. 26A bottom panel).

[0506] ASOs were designed to basepair to the human CFTR exon 23 pre-mRNA and tested for their ability to induce exon 23 skipping via steric interference of the splicing machinery in an immortalized CFTR W1282X patient-derived bronchial epithelial cell line (16HBEge-W1282X-CFTR) (FIG. 26B). This cell line has minimal Cl-transport activity and CFTR mRNA levels are ˜20% of wild-type, due to NMD (Valley et al. 2019). Treatment of these cells with ASO-23-4 resulted in exon 23 skipping (FIG. 26C, 26D, Table 7).

[0507] ASO-23-4 strongly induced exon 23 skipping but also activated a cryptic 5′ splice site within exon 23. The mRNA produced from splicing at this cryptic site is out of frame, creating a nearby PTC. Blocking this cryptic site with another ASO could increase exon 23 skipping induced by ASO 23-4 by reducing competition for splicing by the cryptic site. Thus, ASO 23-3 was designed, which basepairs to the region comprising the cryptic splice site (FIG. 26B). Treatment with both ASO-23-3 to block the cryptic 5′ splice site and ASO-23-4 to block the natural 5′ splice site resulted in robust exon 23 skipping without cryptic splicing (FIG. 26C, Table 7).

[0508] To correlate the ASO-mediated increase in stable CFTR mRNA with CFTR function, it was tested whether ASO-23-4 could improve forskolin-stimulated conductance in 16HBEge-W1282X-CFTR clonal cell lines selected for high resistance (Clone 1=3F2). Cells were plated on trans-well filter plates and transfected on the apical surface with vehicle, ASO-C, ASO-23-3, ASO-23-4 or ASO-23-3 combined with ASO-23-4 after 4 days. After 48 hours, the transfection media was removed and replaced with media containing the correctors VX-661+VX-445 or vehicle (0.2% DMSO). Cells were treated for 24 hours and then assayed for conductance using a TECC-24 workstation. Transepithelial resistance (Rt) was recorded to calculate a conductance (Gt) attributable to forskolin-stimulated chloride secretion. Along with corrector treatments, the activity of the potentiator VX-770, an FDA-approved therapeutic for patients with CF, was tested. Both the correctors along with VX-770 make up the drug Trikafta, the most recent approved modulator therapy for CF patients. Inhibitor-172 (Inh-172), an inhibitor CFTR, was added 20 minutes after VX-770 to confirm that the measured conductance was a result of CFTR activity (FIG. 26D). Measurements were plotted as conductance traces and area under the curve (AUC) of the forskolin+V-770 test period was calculated to assess treatment effect. RNA was isolated after functional analysis to assess CFTR mRNA stability and exon 23 skipping.

[0509] Treatment with the ASO-23-4 alone resulted in a robust increase in conductance over the control treatments when combined with modulator treatment (FIG. 26D, Table 8). Treatment with ASO-23-3 alone did not increase conductance, but treatment with both ASO-23-3 and ASO-23-4 increased conductance above that achieved with treatment with ASO-23-4 alone (FIG. 26D, Table 8). The increase in conductance mediated by ASO treatment correlated with an increase in CFTR-exon 23 skipping (FIG. 26C. Table 7, Table 8). Together, these results reveal that the treatment of CFTR W1282X cells with a combination of ASO-23-3 and 23-4 induces robust exon 23 skipping and a significant increase in CFTR conductance. The combination of the two ASOs is more effective than cither ASO alone.

[0510] To further demonstrate the activity of the ASO-23-3 plus ASO-23-4 combination treatment, cells were treated with an increasing dose of the two ASOs in 16HBEge-W1282X-CFTR cells and tested conductance and splicing as described previously (FIG. 26). Increasing the concentration of each ASO delivered to the cells resulted in increasing exon 23 skipping (FIG. 27A, Table 9) and chloride conductance (FIG. 27B, 27C, Table 10) that correlated with the dose.

TABLE 6
Splice-switching Antisense Oligonucleotides,
Primers, and Probes

| | Sequence (5′-3′) |
|---|---|
| ASOs | |
| 23-1 | ATCCAGTTCTTCCCAAGAGGCCCAC |
| | (SEQ ID NO: 123) |
| 23-2 | AGCTGATAACAAAGTACTCTTCCCT |
| | (SEQ ID NO: 124) |
| 23-3 | AAGTTATTGAATCCCAAGACACACC |
| | (SEQ ID NO: 125) |
| 23-4 | CTAAGTCCTTTTGCTCACCTGTGGT |
| | (SEQ ID NO: 126) |
| Control (ASO-C) | CCTCTTACCTCAGTTACAATTTATA |
| | (SEQ ID NO: 151) |
| Primers | |
| 41: hCFTRex22F | CCAAACCATACAAGAAT |
| | (SEQ ID NO: 152) |
| 41: hCFTRex24R | GATCACTCCACTGTTCAT |
| | (SEQ ID NO: 153) |
| 43: hCFTR-F508F | TGGCACCATTAAAGAAAATATCATC |
| | TT (SEQ ID NO: 154) |
| 44: hCFTR-F508R | CTCAGTGTGATTCCACCTTCTC |
| | (SEQ ID NO: 155) |
| 45: hβ-actinFor | AAAGACCTGTACGCCAACAC |
| | (SEQ ID NO: 156) |
| 45: hβ-actinRev | GTCATACTCCTGCTTGCTGAT |
| | (SEQ ID NO: 157) |
| Probes | |
| hCFTR-F508 | 5.6-FAM/ACAGAAGCG/ZEN/ |
| | TCATCAAAGCATGCC/3IABkFQ |
| | (SEQ ID NO: 158) |
| hβ-actin | 5HEX/TCATCCATG/ZEN/ |
| | GTGAGCTGGCGG/3IABkFQ |
| | (SEQ ID NO: 159) |

TABLE 7
Exon 23 skipping quantitation from FIG. 26C
measured by RT-PCR analysis of RNA isolated
from immortalized CFTR W1282X human
bronchial epithelial cells (16HBEge-W1282X-
CFTR clone 3F2) treated with VX-770, VX-661,
VX445 in combination with indicated ASO(s).
The highest skipping is achieved with the
combination of SEQ ID: 125 with SEQ ID: 126.

| ASO | Exon 23 skipping (%) |
|---|---|
| ASO-C | 0 |
| ASO-23-3 (SEQ ID: 125) | 0 |
| ASO-23-4 (SEQ ID: 126) | 12 |
| ASO-23-3 (SEQ ID: 125) + | 79 |
| ASO-23-4 (SEQ ID: 126) | |

TABLE 8
Conductance measurements of immortalized CFTR
W1282X human bronchial epithelial cells (16HBEge-
W1282X-CFTR clone 3F2) treated with VX-770 alone
or VX-770, VX-661, VX445 in combination with
indicated ASO(s) from FIG. 26D. The highest
conductance is achieved with the combination of
SEQ ID: 125 with SEQ ID: 126.

| | AUC (mS/cm² · 20 min) | |
|---|---|---|
| | | VX-770 + |
| | | VX-661 + |
| ASO | VX-770 | VX-445 |
| ASO-C | −0.35 | 1.38 |
| ASO-23-3 (SEQ ID: 125) | 1.21 | 5.76 |
| ASO-23-4 (SEQ ID: 126) | 1.59 | 10.5 |
| ASO-23-3 (SEQ ID: 125) + | 2.13 | 17.9 |
| ASO-23-4 (SEQ ID: 126) | | |

TABLE 9
Exon 23 skipping quantitation from FIG. 27A
measured by RT-PCR analysis of RNA isolated from
immortalized CFTR W1282X human bronchial
epithelial cells (16HBEge-W1282X-CFTR clone 3F2)
treated with VX-770, VX-661, VX445 in combination
with indicated ASO(s).

| ASO | Exon 23 skipping (%) |
|---|---|
| vehicle | 0 |
| ASO-C | 0 |
| ASO-23-3; 23-4 10 μM | 12 |
| ASO-23-3; 23-4 20 μM | 21 |
| ASO-23-3; 23-4 40 μM | 51* |
| ASO-23-3; 23-4 80 μM | 59* |

*p < 0.05, One-way ANOVA with Dunnett's multiple comparison test compared to vehicle.

TABLE 10
Conductance measurements of immortalized CFTR
W1282X human bronchial epithelial cells (16HBEge-
W1282X-CFTR clone 3F2) treated with DMSO
(vehicle) or VX-770, VX-661, VX-445 in combination
with indicated ASO23-3 + 23-4 (SEQ ID: 125 with
SEQ ID: 126) from FIG. 27C.

| | AUC (mS/cm² · 20 min) | |
|---|---|---|
| | | VX-770 + |
| | | VX-661 + |
| ASO | DMSO | VX-445 |
| vehicle | 0.55 | 5.28 |
| ASO-C | 0.53 | 3.80 |
| ASO-23-3; 23-4 10 μM | 1.50 | 8.60 |
| ASO-23-3; 23-4 20 μM | 0.87 | 9.67 |
| ASO-23-3; 23-4 40 μM | 2.03 | 17.2** |
| ASO-23-3; 23-4 80 μM | 2.27 | 18.0*** |

**P < 0.005,
***P < 0.001, Two-way ANOVA analysis with Sidak's multiple comparison test.

### Example 10. Open Reading Frame Correction Using Antisense Oligonucleotides for the Treatment of Cystic Fibrosis

[0511] CFTR gene mutations that result in the introduction of premature termination codons (PTCs) are common in cystic fibrosis (CF). This mutation type causes a severe form of the disease, likely because of low CFTR mRNA expression as a result of nonsense-mediated mRNA decay (NMD), as well as the production of a non-functional, truncated CFTR protein. Current therapeutics for CF, which target residual protein function, are less effective in patients with these types of mutations, due in part to low CFTR protein levels. Splice-switching antisense oligonucleotides (ASOs) designed to induce skipping of exons in order to restore the mRNA open reading frame have shown therapeutic promise pre-clinically and clinically for a number of diseases. ASO-mediated skipping of CFTR exon 23 may recover CFTR activity associated with terminating mutations in the exon, including CFTR p. W1282X, the 5th most common mutation in CF. As shown herein, CFTR lacking the amino acids encoding exon 23 is partially functional and responsive to corrector and modulator drugs currently in clinical use. ASO-induced exon 23 skipping rescued CFTR expression and chloride current in primary human bronchial epithelial cells isolated from homozygote CFTR-W1282X patients. These results support the use of ASOs in treating CF patients with CFTR class I mutations in exon 23 that result in unstable CFTR mRNA and truncations of the CFTR protein.

[0512] Cystic fibrosis (CF) is an autosomal recessive genetic disease caused by mutations in the cystic fibrosis transmembrane conductance regulator (CFTR) gene. CFTR transports chloride and bicarbonate across the apical surface of epithelial cells. Loss of CFTR expression or function affects multiple organ systems, including the lungs, liver, pancreas, intestines, smooth muscle and heart. In the lung, CFTR-mediated chloride secretion and sodium absorption by the epithelial sodium channel regulate airway surface liquid hydration. Loss of CFTR causes disruption of mucociliary clearance, resulting in the proliferation of airway pathogens, chronic infection, inflammation, and bronchial damage.

[0513] Though there are over 2,000 variants in CFTR, most therapeutics that are clinically available or in development are designed for specific patient subpopulations with the most common mutations. Currently, there are four FDA-approved drugs that directly target CFTR function. These drugs are referred to as CFTR modulators. Ivacaftor (VX-770) potentiates function of CFTR by increasing the probability of channel opening for gating variants, lumacaftor (VX-809) and tezacaftor (VX-661) correct processing and trafficking of CFTR to the cell surface. A new corrector, elexacaftor (VX-445), works in combination with tezacaftor and ivacaftor. While drug development has recently expanded drastically there is a critical need for therapies to treat patients with rare CFTR mutations, in particular nonsense variants that create a premature termination codons (PTC) resulting in low CFTR expression.

[0514] One of the most common nonsense mutations associated with CF is CFTR p. W1282X (c.3846G>A). CFTR-W1282X is the fifth most common CF-causing mutation worldwide and the second most common class I mutation associated with the disease. This mutation results in a truncated CFTR (CFTR1281), removing ˜60% of the nucleotide binding domain 2 (NBD2) but retaining 1281 of the 1480 amino acids in the full-length protein. The truncated CFTR-W1282X protein has processing and/or gating defects but is responsive to potentiator and corrector treatment. However, CFTR-W1282X mRNA is degraded by nonsense mediated mRNA decay (NMD), leading to a decrease in mRNA and protein abundance, thereby limiting the effect of modulator drugs. Small molecule compounds that inhibit NMD have been shown to increase CFTR-W1282X expression but to date no effective drug candidates targeting NMD have been approved for use.

[0515] Antisense oligonucleotides (ASOs) are another possible therapeutic approach for treating CF caused by nonsense and frameshift mutations. ASOs are short oligonucleotides, chemically-modified to create stable, specific and long lasting drugs that can be designed to modulate pre-mRNA splicing. ASOs can be designed to block splicing and induce skipping of an exon, effectively removing it from the mRNA. This strategy can be useful as a potential therapeutic for CFTR-W1282X as amino acid 1282 resides in exon 23 which is a symmetrical exon that can be eliminated from the mRNA without disrupting the CFTR open reading frame. This approach would have a therapeutic benefit not only by producing a potentially functional protein isoform with a restored C-terminus, as suggested by biochemical and functional studies of CFTR, but also by eliminating the PTC, stabilizing the mRNA and increasing protein expression, thereby improving efficacy of CFTR modulators.

[0516] As demonstrated herein, a CFTR isoform lacking the amino acids encoded by exon 23 has partial activity when exposed to CFTR modulator drugs. A splice-switching ASO strategy that induces exon 23 skipping was identified and shown that ASO-mediated exon 23 skipping in CFTR-W1282X RNA, in both an immortalized human CFTR-W1282X bronchial epithelial cell line and primary epithelial cells isolated from CF patients homozygous for CFTR-W1282X, stabilizes the CFTR mRNA and recovers CFTR activity. Also provided herein is evidence that ASO-induced exon 23 skipping has partial allele specificity for CFTR-W1282X which could be advantageous in treating CF patients heterozygous for CFTR-W1282X and another mutation less responsive to current therapeutics.

### Results

CFTR mRNA Lacking Exon 23 Generates a Partially Active Protein.

[0517] The CFTR-W1282X mutation resides within exon 23 of CFTR RNA. Exon 23 is a symmetrical exon that can be removed without disrupting the open reading frame (FIG. 28A). As a first step in determining whether correction of the CFTR-W1282X open reading frame by removing exon 23 might be therapeutic, it was tested whether an expressed CFTR isoform lacking the amino acids encoded by exon 23 had channel activity (FIG. 28B). FRT cells, which lack endogenous CFTR, were transfected with plasmids expressing CFTR without exon 23 (CFTR-Δ23) or with the W1282X mutation (CFTR-W1282X). Transepithelial resistance measurements were recorded from the cells after monolayers formed and transepithelial conductance (Gt=1/Rt) attributed to forskolin-stimulated activation of CFTR and inhibition by CFTR inhibitor. Inh-172, were calculated. Measurements were plotted as conductance traces (FIG. 28C) and the area under the curve (AUC) was calculated for comparison (FIG. 28D). To test the responsiveness of CFTR-W1282X and CFTR-Δ23 to CFTR modulators known to increase CFTR-W1282X function, the cells were treated with VX-770 and C18 (VRT-534), an analog of the corrector VX-809, or VX-445+VX-661. CFTR-specific activity was undetectable in untreated or VX-770-treated cells. In contrast, both CFTR-Δ23 and CFTR-W1282X had similar significant increases in activity following corrector and potentiator treatment (FIGS. 28C and 28D). This increase in functional activity corresponded with an increase in CFTR protein as indicated by an increase in the fully glycosylated CFTR isoform (Band C) and the core glycosylated isoform (Band B) (FIGS. 28E and 28F). These results demonstrate that CFTR-Δ23 has functional activity in the presence of CFTR modulator drugs.

[0518] A splice-switching ASO induces exon 23 skipping and increases CFTR mRNA and chloride channel activity in a CFTR-W1282X immortalized human bronchial epithelial cell line.

[0519] Splice-switching ASOs are a therapeutic platform that can be used to induce exon 23 skipping to stabilize CFTR-W1282X mRNA and increase abundance of the partially functional CFTR-Δ23 protein isoform (FIG. 29A). Four ASOs designed to base-pair to human CFTR exon 23 pre-mRNA and induce exon 23 skipping via a steric block of the splicing machinery were tested (FIG. 29B). ASO-23A, which basepairs to the 5′ splice site (FIGS. 29B and 29D), induced exon 23 skipping when transfected into an immortalized patient-derived bronchial epithelial cell line expressing CFTR-W1282X (CFF16HBEge-W1282X) (FIG. 29C). ASO-23A also induced splicing at a cryptic 5′ splice site within exon 23, which results in out-of-frame mRNA. To reduce the use of this cryptic splice site and maximize exon 23 skipping, cells were co-transfected with ASO-23A and another ASO. ASO-23B, which blocks the cryptic splice site (FIG. 29D). Treatment of cells with ASO-23A and ASO-23B (ASO-23AB) eliminated cryptic splice site use and resulted in a dose-dependent increase in exon 23 skipping (FIGS. 29E and 29F).

[0520] It was next tested whether ASO-23AB treatment could increase conductance in the immortalized hBE CFTR-W1282X cell lines. ASO-23AB treatment resulted in a significant increase in conductance when modulators were present compared to controls (FIGS. 30A and 30B). The conductance increased in an ASO dose-dependent manner (FIG. 30B). This increase in activity corresponded with an increase in exon 23 skipping (FIGS. 30C and 30D). There was a positive correlation between ASO-induced exon 23 skipping and conductance (FIG. 30E).

### ASO-Induced Exon Skipping Rescues Chloride Currents in Homozygous CFTR-W1282X Patient-Derived Bronchial Epithelial Cells.

[0521] To further assess the therapeutic potential of ASO-induced exon skipping in correcting the CFTR-W1282X mutation the effects of ASO treatment on channel activity was analyzed in differentiated primary human bronchial epithelial (hBE) cells isolated from a CF patient homozygous for CFTR-W1282X. This cell-based model is the gold-standard for pre-clinical testing of CF therapeutics as the functional responses to drugs in this assay has been shown to accurately predict efficacy in the clinic. Transepithelial voltage (Vt) and resistance (Rt) was recorded to calculate an equivalent current (Ieq=Vt/Rt). Without ASO treatment, only the combination treatment of VX-770. VX-445 and VX-661 had a significant effect on chloride secretion in the cells (FIGS. 31A and 31B). ASO-23AB treatment in combination with VX-770+C18, or VX-770+VX-445+VX-661, resulted in a ˜5-fold and 3-fold increase in chloride secretion, respectively, compared to either modulator treatment alone (FIGS. 31A and 31B).

[0522] This functional rescue by ASO-23AB treatment was accompanied by a significant induction of exon 23 skipping (FIGS. 31C and 31D). ASO-23AB treatment resulted in a 3-fold increase in total CFTR mRNA compared to untreated samples, a level that is ˜30% of mRNA levels in wildtype non-CF donor hBE cells (FIGS. 31E and 31F). The rescue of total CFTR RNA expression is indicative of a stabilization of mRNA as a result of elimination of the PTC introduced by the CFTR-W1282X mutation in exon 23. ASO treatment also resulted in an increase in CFTR protein (FIGS. 31G and 31H). The stabilization of CFTR-W1282X mRNA and increase in CFTR protein expression correlates with the rescue of chloride secretion in these patient cells, predictive of a potential therapeutic effect of ASO-23AB treatment over current modulator drugs for patients homozygous for CFTR-W1282X.

### Activity and Allele-Specificity of ASOs in Patient-Derived Bronchial Epithelial Cells Compound Heterozygous for CFTR-W1282X and F508del.

[0523] Many CF patients with the CFTR-W1282X mutation are compound heterozygotes, with a different mutation, most commonly CFTR-F508del, in the other CFTR allele. This second allele would also be a target of ASO-induced exon 23 skipping and would result in a CFTR protein with the original mutation and a deletion of exon 23. To test the effect of ASO-induced exon 23 skipping on mRNA from CFTR mutations commonly found with CFTR-W1282X in compound heterozygotes, primary hBE cells isolated from a CF patient with the CFTR-W1282X and CFTR-F508del mutations were treated with ASO-23AB and measured chloride secretion (FIG. 32A).

[0524] In cells from this patient, both modulator combinations of VX-770+C18, and VX-770+VX-445+VX-661, resulted in significant recovery of chloride secretion, as expected given that CFTR-F508del is known to be responsive to each drug (FIG. 32B). ASO-23AB treatment had no significant effect on this rescue, with cells showing no increase or decrease in potentiator and corrector response (FIG. 32B).

[0525] Analysis of RNA splicing revealed a significant induction of exon 23 skipping with ASO treatment compared to the controls. However, exon 23 skipping was considerably lower (25% of total RNA) (FIGS. 32C and 32D) than the skipping obtained in CFTR-W1282X homozygous donor cells (80% of total RNA) (FIGS. 31C and 31D). These results suggest that exon 23 skipping of RNA from CFTR-F508del may be less efficient.

[0526] To analyze the effect of ASO-23AB on exon 23 from mRNA derived from each allele specifically, primers were designed to anneal at the F508del mutation site and specifically amplify either non-F508del or F508del mRNA (Table 11). When comparing the baseline expression of mRNA from each allele, RNA derived from the CFTR-W1282X allele was only 20% of that expressed from the CFTR-F508del allele (FIG. 33A) most likely due to transcript degradation by nonsense mediated decay. ASO treatment significantly increased this expression to ˜40% of that generated from the CFTR-F508del allele (FIG. 33A). Analysis of RNA from each allele separately revealed a 2-fold increase in CFTR transcripts from CFTR-W1282X, similar to levels achieved in the homozygous donor and up to 20% of wild-type CFTR expression (FIGS. 32E and 32F). In contrast, the ASO had no significant effect on total CFTR mRNA expression from the CFTR-F508del allele (FIGS. 32G and 32H).

TABLE 11
Sequences

| | Sequence (5′ to 3′) |
|---|---|
| ASOs | |
| ASO-23A | CTAAGTCCTTTTGCTCACCTGTGGT (SEQ ID NO: 126) |
| ASO-23B | AAGTTATTGAATCCCAAGACACACC (SEQ ID NO: 125) |
| ASO-23C | AGCTGATAACAAAGTACTCTTCCCT (SEQ ID NO: 124) |
| ASO-23D | ATCCAGTTCTTCCCAAGAGGCCCAC (SEQ ID NO: 123) |
| ASO-C | CCTCTTACCTCAGTTACAATTTATA (SEQ ID NO: 151) |
| Primers | |
| 1: HCAI-CFTRde123R | GCGCTGGCCGGGGCTGAT (SEQ ID NO: 160) |
| 2: HCAI-CFTRde123F | AAGGTGTTCATCTTCAGCGGCACCTTC (SEQ ID NO: 161) |
| 3: HCAI-CFTRWXF | TGCAGCAGTGACGCAAAGGCCTT (SEQ ID NO: 162) |
| 4: HCAI-CFTRWXR | GGGTGATGCTGTCCCAGC (SEQ ID NO: 163) |
| 5: hCFTR-ex11ΔFF | GCCTGGCACCATTAAAGAAAATATCATTGG (SEQ ID NO: 164) |
| 6: hCFTR-exl1F | GCCTGGCACCATTAAAGAAAATATCATCTT (SEQ ID NO: 165) |
| 7: hCFTR-ex14R | TCCAGGAGACAGGAGCATCT (SEQ ID NO: 166) |
| 8: hCFTR-ex22F | CCAAACCATACAAGAAT (SEQ ID NO: 152) |
| 9: hCFTR-ex24R | GATCACTCCACTGTTCAT (SEQ ID NO: 153) |
| 10: hCFTR-ex25R | GTTCTATCACAGATCTGAG (SEQ ID NO: 167) |
| 11: qhCFTR-ex11WTF | TGGCACCATTAAAGAAAATATCATCTT (SEQ ID NO: 154) |
| 12: qhCFTR-ex12WTR | CTCAGTGTGATTCCACCTTCTC (SEQ ID NO: 155) |
| 13: qhCFTR-exl1ΔFF | GGCACCATTAAAGAAAATATCATTGG (SEQ ID NO: 168) |
| 14: qhCFIR-exl2ΔFR | CTCAGTGTGATTCCACCTTCT (SEQ ID NO: 169) |
| 15: hβ-actinFor | AAAGACCTGTACGCCAACAC (SEQ ID NO: 156) |
| 16: hβ-actinRev | GTCATACTCCTGCTTGCTGAT (SEQ ID NO: 157) |
| 17: qhHPRT1For | GCGATGTCAATAGGACTCCAG (SEQ ID NO: 170) |
| 18: qhHPRT1Rev | TTGTTGTAGGATATGCCCTTGA (SEQ ID NO: 171) |
| Probes | |
| hCFTR-DF508 | /56-FAM/ACAGAAGCG/ZEN/TCATCAAAGCATGCC/3IABkFQ/ |
| | (SEQ ID NO: 172) |
| hCFTR-F508 | /5.6-FAM/ACAGAAGCG/ZEN/TCATCAAAGCATGCC/3IABkFQ/ |
| | (SEQ ID NO: 158) |
| hHPRT1 | /5HEX/AGCCTAAGA/ZEN/TGAGAGTTCAAGTTGAGTTTGG/ |
| | 3IABkFQ/ (SEQ ID NO: 173) |

[0527] To further investigate the reason for an increase in total mRNA from the CFTR-W1282X allele with ASO treatment, yet a large reduction in total exon 23 skipping compared to the homozygous donor cells, ASO-induced exon 23 skipping from each allele was analyzed using allele specific primers. This analysis revealed an increase in exon skipping in mRNA from the CFTR-W1282X allele (71%) compared to transcripts from the CFTR-F508del allele (2%), suggesting that ASO treatment has a greater effect on CFTR-W1282X than on CFTR-F508del (FIG. 33B). Comparative sequence analysis of exon 23 indicated that binding sites for several splicing proteins are eliminated by the G>A change in W1282X compared to wild-type CFTR (ESEfinder3.0) (FIG. 33C). The elimination of these splicing enhancer cis-acting sequences may weaken splicing to the exon and make the ASO more effective in inducing skipping. In fact, ASO treatment in non-CF and CFTR-F508del homozygous donor cells in comparison to donor cells with either one or two copies of CFTR-W1282X showed an increase in ASO-induced exon 23 skipping that correlated with the number of CFTR-W1282X alleles (FIG. 33D). This result suggests ASO-23AB may be more effective at inducing exon 23 skipping in CFTR-W1282X RNA, which could be advantageous in treating CF patients compound heterozygous for CFTR-W1282X and another CFTR mutation less responsive to modulator treatment.

### DISCUSSION

[0528] Despite clinical success, the use of ASOs to correct the translational open reading frame and recover gene expression in diseases caused by frameshift or nonsense mutations resulting in PTCs has not been extensively explored as a therapeutic approach. These types of mutations are the most common disease-causing mutations and account for ˜20% of disease-associated mutations in cystic fibrosis. As demonstrated herein, elimination of the relatively common nonsense mutation, CFTR-W1282X, by ASO-induced skipping of CFTR exon 23, which encodes the mutation, recovers CFTR expression. The activity of this CFTR isoform, lacking 52 amino acids, requires CFTR modulator drugs that are currently used to treat CF patients. Thus, this ASO approach in combination with current CF drugs offers a potential therapeutic for individuals with the CFTR-W1282X mutation and opens the door for similar strategies to treat other terminating mutations, both in CF and other diseases.

[0529] Gene mutations that result in PTCs are challenging to treat because they not only encode a truncated protein product, but the mRNA intermediate is a target of NMD, a cellular quality-control mechanism whereby mRNA with PTCs are degraded. Studies have shown that, if produced at sufficient levels, CFTR-W1282X protein is responsive to current CFTR modulator therapies but because stop mutations in CFTR result in a dramatic loss of CFTR expression, CF patients are not usually responsive to these drugs. Approaches are being pursued to identify molecules that stabilize mRNA by blocking NMD but, because NMD is an important mechanism regulating gene expression, any approach must avoid global inhibition of NMD which would likely have toxic effects. Small molecules that promote translational readthrough of termination codons are also being explored as potential treatments for PTC mutations, including CF. However, effects from the long-term use of these drugs has raised concerns. Though these approaches may hold promise, none are specific to CFTR directly, and to date none have been approved for use in CF patients. More recently, gene-specific suppression of NMD, has been explored as a promising approach to overcome potential risk of global NMD knockdown.

[0530] Using ASOs to remove exons encoding stop codons to correct the translational open reading frame has broad applications for addressing terminating mutations. ASO-mediated reading frame correction via induced skipping of symmetrical exons has shown promise in the FDA-approved ASOs targeting PTCs in Duchenne's Muscular Dystrophy and also in pre-clinical studies in mice for the treatment of diseases such as CLN3 Batten. A critical requirement for this approach is that the induced protein isoform must retain partial function. As shown herein, CFTR-Δ23 had significant CAMP-activated conductance responses that were further enhanced by modulator treatments (FIG. 28). Exon 23 encodes amino acids near the C-terminus of CFTR including a portion of the nucleotide-binding domain 2 (NBD2). The retained function of CFTR-Δ23 is consistent with previous reports that truncation at NBD2 results in a CFTR protein that is trafficked to the cell surface, albeit with deleterious effects on channel gating. The result also aligns with data showing that the CFTR-W1282X mutation is responsive to modulator therapies (FIG. 28). Notably, though truncation of CFTR at NBD2 results in some retained function, domains at the C-terminus are important for stability and gating and these domains are preserved when exon 23 is skipped.

[0531] The clinical potential of ASO delivery to the respiratory system, one of the primary targets for CF therapeutics, has been demonstrated for asthma and other inflammatory lung conditions. Naked ASOs have been successfully delivered to the lung, where they access multiple cell types including cells which express CFTR. Acrosolization of ASOs have shown promise in delivery in both a CF-like lung disease model in mice as well as CF patients. Additionally, ASOs have been shown to have long-lasting effects in primary human bronchial epithelial cells isolated from CF-patients, and in vivo, with treatment durations lasting weeks to months before further dosing is needed in patients. In addition, as patients with class I mutations tend to have disease phenotypes in other organs including the digestive system, systemic delivery of ASOs may also be considered. Intravenous and subcutaneous injections of ASOs are currently used to treat patients and bioavailable ASO formulations that target the gut epithelia have shown some potential.

[0532] Unlike other therapeutics targeting global NMD or inducing translational readthrough, the ASOs disclosed herein target CFTR transcripts specifically to induce skipping of exon 23 (FIG. 29). ASO treatment in immortalized and patient-derived hBE cells expressing CFTR-W1282X resulted in a dose-dependent increase in exon 23 skipping that correlated with an increase in function (FIGS. 30 and 31). Further, assessment of mRNA from ASO-treated primary hBE cells from a patient with CFTR-W1282X and CFTR-F508del revealed partial allele specificity of ASO induced exon 23 skipping for CFTR-W1282X (FIG. 33), potentially broadening the scope of this ASO strategy to CF patients heterozygous for CFTR-W1282X and another CFTR mutation less responsive to current modulator therapies. Despite effectively inducing skipping of CFTR-W1282X mRNA, ASO-induced exon 23 skipping did not have an improved effect on function compared to modulator treatment alone (FIG. 32). It is possible that a functional ceiling is achieved with modulator treatment in cells from this compound heterozygous donor, and additional expression from the CFTR-W1282X allele does not increase chloride current above what was already achieved with modulator rescue on CFTR-F508del, for which the modulators were developed. There have been a number of studies identifying other corrector and potentiator drugs superior to these modulators in the context of CFTR-W1282X. The effect of these new modulators was not tested along with ASO treatment here, but they have been shown to be effective in rescuing CFTR-W1282X activity in conjunction with other readthrough compounds that enhance CFTR-W1282X expression. Future studies may reveal better modulator/ASO combinations for treating CFTR-W1282X compound heterozygotes. Overall, the results herein support the use of ASO treatment in combination with approved CF modulators as an effective treatment option for CF patients with class I mutations within symmetrical exons.

### Materials and Methods

[0533] Expression plasmids: CFTR-Δ23 and CFTR-W1282X were created from the synthetic CFTR high codon adaption index (HCAI) construct subcloned in the pcDNA3.1/Neo (+) vector using the Q5 Site-Directed Mutagenesis Kit (NEB) with primers flanking each exon (Table 11). All plasmids were sequenced to confirm mutations. Plasmids were stably transfected into Fischer Rat Thyroid (FRT) cells in 6-well plates using lipofectamine LTX (Thermo Fisher) and OptiMEM (Thermo Fisher) for 48 hours. Cells were transferred to T75 flasks and clonal cell lines were selected with G418 (300 μg/ml) for one week. After selection cells were maintained in media supplemented with G418 (150 μg/ml).

[0534] Cells and culture conditions: FRT cell lines were cultured in F12 Coon's modification media (Sigma, F6636) supplemented with 10% FBS and 1% Penicillin-Streptomycin (PenStrep). 16hBEge-W1282X cell lines were obtained from the Cystic Fibrosis Foundation (CFF) and cultured according to their instructions in MEM media. Single-cell clones of the original CFF16hBEge-W1282X cell line were created to select for high resistance clonal cell lines. One clonal cell line, CFF16hBEge-W1282X-SCC: 3F2, was selected for analysis. Primary human bronchial epithelial cells (hBE) isolated from CF patients homozygous for CFTR-W1282X (patient code HBEU10014) and compound heterozygous for CFTR-W1282X and CFTR-F508del (patient code HBEND12112) were also obtained from the CFF. For functional analysis cells were differentiated by plating on Costar 24-well high-throughput screening filter plates (0.4 μM pore size, Polyester, Corning, catalog #CLS3397). FRT and 16hBE cells were grown in a liquid/liquid interface (180 μl apical/700 μl basolateral) in a 37° C. incubator with 90% humidity and 5% CO₂ for one week. Primary hBE cells were differentiated in an air/liquid interface for five weeks. Media was replaced three times a week.

[0535] Antisense oligonucleotides: Splice-switching antisense oligonucleotides are 25-mer phosphorodiamidate morpholino oligomers (Gene-Tools, LLC) (Table 11). A non-targeting PMO was used as a negative control, ASO-C. (Gene Tools, standard control oligo). ASOs were formulated in sterile water.

[0536] ASO cell transfection: For splicing analysis CFF16hBEge-W1282X-SCC: 3F2 clones were transfected with ASOs at indicated concentrations on 24-well plates in Minimum Essential Medium (MEM) media supplemented with 10% FBS and 1% PenStrep. Cells were transfected using Endo-Porter (Gene-Tools. 6 μl/ml) for 48 hours.

[0537] For functional analysis CFF16HBEge-W1282X-SCC: 3F2 cells were transfected on filter plates four days post plating. Cells were transfected with ASOs apically in 100 μl of complete MEM media with Endo-Porter at indicated concentrations for 48 hours.

[0538] Primary hBE cells were transfected after differentiation on filter plates as previously described (Michaels et al., (2020) Antisense oligonucleotide-mediated correction of CFTR splicing improves chloride secretion in cystic fibrosis patient-derived bronchial epithelial cells. Nucleic Acids Res., 48:7454-7467). Briefly, cells were transfected with ASO in an apical hypo-osmotic solution for 1 hour. The solution was removed, and the cells were treated again in DPBS for 4 days until functional analysis.

[0539] RNA isolation and RT-PCR: RNA was extracted from cells using TRIzol according to manufacturer instructions (Thermo Fisher Scientific). Reverse transcription was performed on total RNA using the GoScript Reverse Transcription System with an oligo-dT primer (Promega). Splicing was analyzed by radiolabeled PCR of resulting cDNA using GoTaq Green (Promega) spiked with α-32P-deoxycytidine triphosphate (dCTP). Primers for amplification are reported in Table 11. Reaction products were run on a 6% non-denaturing polyacrylamide gel and quantified using a Typhoon 7000 phosphorimager (GE Healthcare) and ImageJ software.

[0540] Real-time qPCR: Real-time qPCR was performed with PrimeTime Gene Expression Master Mix and PrimeTime qPCR probe assay kits human non-F508del-CFTR (IDT, qhCFTR-cx11WTF, qhCFTR-cx12WTR, hCFTR-F508), and human F508del-CFTR (IDT, qhCFTR-cx11AFF, qhCFTR-ex12ΔFR, hCFTR-DF508) transcripts were normalized to human HPRT1 (IDT. Hs.PT.58v.45621572) (Table 11). All reactions were analyzed in triplicate on 96-well plates and averaged together to comprise one replicate. Real-time PCR was performed on an Applied Biosystems (ABI) ViiA 7 Real-Time PCR System. Results were analyzed by the ΔΔCT method.

[0541] Protein isolation and automated western analysis: Cell lysates for immunoblot analysis were prepared from cells after functional analysis using NP-40 lysis buffer (1% Igepal. 150 mM NaCl. 50 mM Tris-HCl pH7.6) supplemented with 1× protease inhibitor cocktail (Sigma-Aldrich, cat #11836170001). Protein concentration was measured using a Coomassie (Bradford) protein assay (Thermo Fisher, cat #23200). Cell lysates were prepared using the sample preparation kit (Protein Simple) for an automated capillary western blot system. WES System (Protein Simple). Cell lysates were mixed with 0.1× sample buffer and 5× fluorescent master mix for a final protein lysate concentration of 0.2 mg/ml (FRTs) or 1.5 mg/ml (hBEs). Samples were incubated at room temperature for 20 minutes and then combined with biotinylated protein size markers, primary antibodies against CFTR 432 (FRTs). 570+450 (hBEs) (Riordan lab UNC. Cystic Fibrosis Foundation, diluted 1:100, or 1:50+1:200, with milk-free antibody diluent). β-actin (C4. Santa Cruz Biotechnology, diluted 1:50 with milk-free antibody diluent), and SNRBP2 (4G3, provided by the Krainer Lab: B″, diluted 1:2000 with milk-free antibody diluent), horseradish peroxidase (HRP)-conjugated secondary antibodies, chemiluminescence substrate and wash buffer and dispensed into respective wells of the assay plate and placed in WES apparatus. Samples were run in duplicate or triplicate. Signal intensity (area) of the protein was normalized to the peak area of the loading control C4. β-actin (FRT) or B″. SNRPB2 (hBE). Quantitative analysis of the CFTR B and C-bands was performed using Compass software (Protein Simple).

[0542] Automated conductance and equivalent current assay: Stably transfected FRT cells. 16HBEgc-W1282X-SCC: 3F2, and primary hBE cells were treated with C18 (6 μM) (VRT-534. VX-809 analog). VX-445+VX-661 (3 μM+3.5 μM FRT. 1 μM+3 μM 16hBE and primary hBE) or vehicle (equivalent DMSO) at 37° C. (33). Twenty-four hours later the cells were switched from differentiation media to HEPES-buffered (pH 7.4) F12 Coon's modification media (Sigma. F6636) apically and basolaterally and allowed to equilibrate for one hour at 37° C. without CO₂. To obtain the conductance measurements, the transepithelial resistance was recorded at 37° C. with a 24-channel TECC robotic system (EP Design, Belgium) as previously described (Vu et al . . . (2017) Fatty Acid Cysteamine Conjugates as Novel and Potent Autophagy Activators That Enhance the Correction of Misfolded F508del-Cystic Fibrosis Transmembrane Conductance Regulator (CFTR). J. Med. Chem., 60:458-473). Briefly, for the FRT cells, baseline measurements were taken for ˜20 minutes. Forskolin (10 μM) was first added to the apical and basolateral sides and then cells were treated with potentiator, VX-770 (1 μM). Finally, inhibitor-172 (Inh-172, 20 μM) was added to inactivate CFTR. The 16hBEge-W1812X-3F2 clones were measured similarly apart from forskolin and VX-770 added to the cells at the same time. Measurements were taken at two-minute intervals. Gt was calculated by the reciprocal of the recorded Rt (Gt=1/Rt), after Rt was corrected for solution resistance (Rs) and plotted as conductance traces (FIGS. 28C and 30A). Calculated equivalent currents (Ieq) were obtained similar and as outlined in Michaels et al (Michaels et al., (2020) Antisense oligonucleotide-mediated correction of CFTR splicing improves chloride secretion in cystic fibrosis patient-derived bronchial epithelial cells. Nucleic Acids Res., 48:7454-7467). Ieq was calculated using Ohm's law (Ieq=Vt/Rt) and plotted as current traces (FIGS. 31A and 32A). To estimate average functional response trajectories during each test period, area under the curve measurements of forskolin and forskolin+VX-770 were calculated using a one-third trapezoidal rule for each test period using Excel. The average of two identically treated wells was calculated for each plate to obtain one biological replicate used in the final mean±SEM graphed.

[0543] Statistics: Statistical analyses were performed using GraphPad PRISM 9.2.0. The specific statistical test used in each experiment can be found in the figure legends.

### Example 11. Splice-Switching Antisense Oligonucleotides for the Treatment of Class I CFTR Mutations

[0544] Premature termination codons (PTCs) generated by frameshift and nonsense mutations result in the synthesis of a truncated protein and trigger nonsense-mediated mRNA decay (NMD), largely abolishing functional protein production (1). Due to these multifaceted complications, treatments for diseases caused by terminating variants have been elusive. One therapeutic strategy for PTC-causing disease that has had clinical success uses splice-switching antisense oligonucleotides (ASOs) to induce exon skipping to eliminate pathogenic variants and/or reframe the mRNA transcript (2). This approach requires the exon targeted for ASO-induced skipping to be a symmetrical exon, defined as an exon in the same reading frame register as its flanking exons. Thus, when the symmetrical exon is spliced out, or skipped, the open reading frame is preserved. Symmetrical exon skipping is a common natural form of alternative splicing that can generate protein isoforms with altered functions (3). In the case of disease-associated variants in these exons, this mechanism can be harnessed using ASOs to remove PTCs and thereby stabilize the mRNA and recover protein expression. This approach can be therapeutic if the protein that is produced from the ASO-induced spliced transcript is at least partially functional. This strategy is the basis of the FDA-approved splice-switching antisense oligonucleotides targeting PTCs in Duchenne muscular dystrophy (DMD) (2).

[0545] To establish targets for exon-skipping strategies, an understanding of the function of protein isoforms encoded by mRNAs that lack a specific exon is required. In principle, rapid functional target identification can be achieved by systematic screening of all possible symmetrical exon deletions within a gene. Additionally, as this approach increases protein expression, small molecule drugs that target the protein can be screened for further rescue of protein function, as a potential combination therapy. The utility of this screening approach for investigating treatment strategies for cystic fibrosis (CF) is demonstrated herein.

[0546] CF is an autosomal recessive disease caused by disruption of the cystic fibrosis transmembrane conductance regulator (CFTR) gene that affects more than 100,000 people worldwide. CFTR encodes a transmembrane anion channel, the loss of which results in thick mucus buildup in multiple organs, most severely affecting the lungs and pancreas (4). There are thousands of different CF-associated CFTR variants that cause varying degrees of disease severity, based on their effect on expression and resulting protein function (5). For some variants, there are effective protein-targeted therapeutics approved to treat people with CF (pwCF). These include potentiator drugs, like Ivacaftor (VX-770), which enhance channel gating, and corrector drugs, used in combination with potentiators, which restore processing and trafficking of CFTR to the cell surface (6-8). The most prevalent treatment, Trikafta, is a combination of VX-770 and the correctors VX-661 and VX-445 (elexacaftor, tezacafter, ivacaftor: ETI) (7). These small molecule therapeutics, collectively referred to as highly effective modulator therapeutics (HEMTs), are effective in treating CF caused by more common variants, such as CFTR-F508del. However, because these drugs target the CFTR protein, they are not effective in treating CF caused by pathogenic variants that preclude protein production, such as those that produce PTCs. These types of variants account for ˜11% of all CF-causing variants and ˜62% of variants that are not eligible for treatment with current HEMTs (9-11).

[0547] For one such variant, CFTR-W1282X, it has been reported that an effective ASO approach that corrects CFTR function by inducing the skipping of exon 23, a symmetrical exon which houses the variant (12-14). CFTR contains many other symmetrical exons that could be eliminated to remove variant-induced PTCs and NMD targets (FIG. 35A). If the protein isoform lacking an exon retains some function and/or is amenable to rescue by HEMTs, ASO-mediated skipping of these exons has the potential to treat any truncating variants that have been identified within these CFTR exons (FIG. 35B). As disclosed herein, utilizing a systematic engineered protein screening approach, identified CFTR symmetrical exons encoding amino acids in the C-terminus of the protein that can be removed and still produce a CFTR isoform with HEMT-responsive function. ASO-induced skipping of these exons can induce these isoforms, providing the beginnings of a therapeutic path forward for treating CF caused by variants in these exons. Overall, it is estimated that about 10% of CFTR variants that do not currently have effective treatment options may be responsive to this ASO-mediated exon skipping approach. These findings demonstrate the effectiveness of engineered protein screening to rapidly test for functional protein isoforms to guide strategic ASO design and assessment for exon skipping and functional protein production. This strategy offers a way to treat pathogenic terminating variants that can be broadly applied to any genetic disease.

### Materials and Methods

[0548] Generation of exon deletion expression plasmids: CFTR-Δexon deletion plasmids were constructed from the synthetic CFTR high codon adaption index (HCAI) into the pcDNA3.1/Neo (+) vector using the Q5 Site-Directed Mutagenesis Kit (NEB) (Table 12) (15). All plasmid deletions were sequenced. Plasmids were reverse transfected into Fischer Rat Thyroid (FRT) cells with lipofectamine LTX (Thermo Fisher) and OptiMEM (Thermo Fisher). Clonal cell lines were selected with G418 (300 μg/ml) and maintained in media supplemented with G418 (150 μg/ml).

TABLE 12
Primers flanking CFTR symmetrical exons used to
make CFTR exon deletion constructs.

| Primers | Sequence (5'-3') |
|---|---|
| 1: HCAI-CFTRdel2R | CTGAAGAACAGCTTGCTCACCAC |
| | (SEQ ID NO: 222) |
| 2: HCAI-CFTRdel2F | CGAGTGGGACCGCGAGCT |
| | (SEQ ID NO: 223) |
| 3: HCAI-CFTRdel4R | GCCCAGGTACAGGAAGATG |
| | (SEQ ID NO: 224) |
| 4: HCAI-CFTRdel4F | ACCCTGAAGCTGAGCAGC |
| | (SEQ ID NO: 225) |
| 5: HCAI-CFTRdel5R | CTTCTTGTAGATCAGGCTGAACA |
| | TGGCGATGC |
| | (SEQ ID NO: 226) |
| 6: HCAI-CFTRde15F | GGCCTGGCCCTGGCCCAC |
| | (SEQ ID NO: 227) |
| 7: HCAI-CFTRdel7R | CGGTACTTCATCATCATGC |
| | (SEQ ID NO: 228 |
| 8: HCAI-CFTRdel7F | GACCGAGCTGAAGCTGAC |
| | (SEQ ID NO: 229) |
| 9: HCAI-CFTRde19R | CTGGATCTTGTTGATGGCGC |
| | (SEQ ID NO: 230) |
| 10: HCAI-CFTRde19F | GGCTTCGGCGAGCTGTTC |
| | (SEQ ID NO: 231) |
| 11: HCAI-CFTRdel10R | CTCCTCCCAGAAGGCGGT |
| | (SEQ ID NO: 232) |
| 12: HCAI-CFTRdel10F | ACCAGCCTGCTGATGGTG |
| | (SEQ ID NO: 233) |
| 13: HCAI-CFTRdel11R | CTTGCCGGCGCCGGTGCT |
| | (SEQ ID NO: 234) |
| 14: HCAI-CFTRdel11F | GACATCAGCAAGTTCGCCGAGAA |
| | GGACAAC |
| | (SEQ ID NO: 235) |
| 15: HCAI-CFTRdel13R | CGGGCCAGGCTGATGCGG |
| | (SEQ ID NO: 236) |
| 16: HCAI-CFTRdel13F | CTGCGTGTGCAAGCTGATGGC |
| | (SEQ ID NO: 237) |
| 17: HCAI-CFTRdel15R | CTTCAGGTCCTCCTCGTTGATCTCC |
| | (SEQ ID NO: 238) |
| 18: HCAI-CFTRdel15F | GTGGCCGCCAGCCTGGTG |
| | (SEQ ID NO: 239) |
| 19: HCAI-CFTRdel20R | CCTCGCTCTCCAGCTGCTTCAGCTGC |
| | (SEQ ID NO: 240) |
| 20: HCAI-CFTRdel20F | GCGAGGGCGAGGGCCGCG |
| | (SEQ ID NO: 241) |
| 21: HCAI-CFTRdel22R | CAGGCTGTCCACGTCGATGCTGC |
| | (SEQ ID NO: 242) |
| 22: HCAI-CFTRdel22F | GTGGGCCTGCTGGGCCGC |
| | (SEQ ID NO: 243) |
| 23: HCAI-CFTRdel23R | GCGCTGGCCGGGGCTGAT |
| | (SEQ ID NO: 244) |
| 24: HCAI-CFTRdel23F | AAGGTGTTCATCTTCAGCGGCACCTTC |
| | (SEQ ID NO: 245) |
| 25: HCAI-CFTRdel24R | CTGGGGGATCACGCCGAAGG |
| | (SEQ ID NO: 246) |
| 26: HCAI-CFTRdel24F | GTGGGCCTGCGCAGCGTG |
| | (SEQ ID NO: 247) |
| 27: HCAI-CFTRdel2526R | GTGATCGAGGAGAACAAGGTGC |
| | (SEQ ID NO: 248) |
| 28: HCAI-CFTRdel2526F | CTCGTCGGCCACCTTCCA |
| | (SEQ ID NO: 249) |

[0549] Cells and culture conditions: FRT cell lines were cultured in F12 Coon's modification media (Sigma, F6636) supplemented with 10% fetal bovine serum (FBS) and 1% Penicillin-Streptomycin (PenStrep). T84 cells were cultured in Dulbecco's Modified Eagle Medium/Nutrient

[0550] Mixture F12 (DMEM/F12) media supplemented with 5% FBS and 1% PenStrep. Primary human bronchial epithelial (hBE) cells were acquired from the Compound Screening and Drug Discovery Core at RFUMS or the Cystic Fibrosis Foundation and thawed at passage (P) 1 or 2 for analysis. For functional studies cells were plated on 24-transwell filter plates (0.4 μM pore size, Polyester, Corning, catalog #CLS3397). FRT cells were grown in a liquid/liquid interface for 1 week. Primary cells were differentiated in an air/liquid interface for 5 weeks.

[0551] Antisense oligonucleotide treatment: Antisense oligonucleotides were 25-mer phosphorodiamidate morpholino oligomers (PMO) formulated in sterile water (Table 13). A non-targeting PMO was used as a negative control, ASO-C(Gene Tools LLC).

TABLE 13
Antisense oligonucleotide sequences designed
to skip symmetrical CFTR exons.

| ASOs | Sequence (5′-3′) | ASOs | Sequence (5′-3′) |
|---|---|---|---|
| 2-1 | ATCCTTTCCTCAAAATTGGTCTGGT | 13-2 | GGTATTCAAAGAACATACCTTTCAA |
| | (SEQ ID NO: 61) | | (SEQ ID NO: 93) |
| 2-2 | GTATATGTCTGACAATTCCAGGCGC | 15-1 | ACAATAGAACATTCTTACCTCTGCC |
| | (SEQ ID NO: 62) | | (SEQ ID NO: 94) |
| 2-3 | CAGATAGATTGTCAGCAGAATCAAC | 20-1 | CAAGATGAGTGAAAATTGGACTCCT |
| | (SEQ ID NO: 63) | | (SEQ ID NO: 110) |
| 2-4 | GTACATGAACATACCTTTCCAATTT | 20-2 | CGAAGGCACGAAGTGTCCATAGTCC |
| | (SEQ ID NO: 64) | | (SEQ ID NO: 111) |
| 4-1 | GAGGCTGTACTGCTTTGGTGACTTC | 20-3 | AACAGAGTTTCAAAGTAAGGCTGCC |
| | (SEQ ID NO: 65) | | (SEQ ID NO: 112) |
| 4-2 | GAAGCTATGATTCTTCCCAGTAAGA | 20-4 | AGTTGGCAGTATGTAAATTCAGAGC |
| | (SEQ ID NO: 66) | | (SEQ ID NO: 113) |
| 4-3 | GTGTAGGAGCAGTGTCCTCACAATA | 20-5 | TTCTATTCTCATTTGGAACCAGCGC |
| | (SEQ ID NO: 67) | | (SEQ ID NO: 114) |
| 4-4 | AATGTGATGAAGGCCAAAAATGGCT | 20-6 | GGTAACAGCAATGAAGAAGATGACA |
| | (SEQ ID NO: 68) | | (SEQ ID NO: 115) |
| 4-5 | GCTATTCTCATCTGCATTCCAATGT | 22-1 | ATGTCAATGAACTTAAAGACTCGGC |
| | (SEQ ID NO: 69) | | (SEQ ID NO: 116) |
| 4-6 | CCTGTGCAAGGAAGTATTACCTTCT | 22-2 | GGCCAGATGTCATCTTTCTTCACGT |
| | (SEQ ID NO: 70) | | (SEQ ID NO: 117) |
| 5-1 | CTAGAACACGGCTTGACAGCTTTAA | 22-3 | ATCTTTGACAGTCATTTGGCCCCCT |
| | (SEQ ID NO: 71) | | (SEQ ID NO: 118) |
| 5-2 | TGGAAAGGAGACTAACAAGTTGTCC | 22-4 | CCACCTTCTGTGTATTTTGCTGTGA |
| | (SEQ ID NO: 72) | | (SEQ ID NO: 119) |
| 7-1 | ACTGATCTTCCCAGCTCTCTGATCT | 22-5 | TCTCTAATATGGCATTTCCACCTTC |
| | (SEQ ID NO: 73) | | (SEQ ID NO: 120) |
| 7-2 | ATTTCTGAGGTAATCACAAGTCTTT | 22-6 | CCAGGACTTATTGAGAAGGAAATGT |
| | (SEQ ID NO: 74) | | (SEQ ID NO: 121) |
| 7-3 | AGTATGCCTTAACAGATTGGATATT | 22-7 | AAGCAGTGTTCAAATCTCACCCTCT |
| | (SEQ ID NO: 75) | | (SEQ ID NO: 122) |
| 7-4 | ATTTTTTCCATTGCTTCTTCCCAGC | 23-1 | ATCCAGTTCTTCCCAAGAGGCCCAC |
| | (SEQ ID NO: 76) | | (SEQ ID NO: 123) |
| 7-5 | ATTGGAACAACTTACTGTCTTAAGT | 23-2 | AGCTGATAACAAAGTACTCTTCCCT |
| | (SEQ ID NO: 77) | | (SEQ ID NO: 124) |
| 9-1 | TCCATCACTACTTCTGTAGTCGTTA | 23-B | AAGTTATTGAATCCCAAGACACACC |
| | (SEQ ID NO: 78) | | (SEQ ID NO: 125) |
| 9-2 | CTCCTCCCAGAAGGCTGTTACATTC | 23-A | CTAAGTCCTTTTGCTCACCTGTGGT |
| | (SEQ ID NO: 79) | | (SEQ ID NO: 126) |
| 9-3 | TTAAAAATTCTGACCTCCTCCCAGA | 24-1 | GATCACTCCACTGTTCATAGGGATC |
| | (SEQ ID NO: 80) | | (SEQ ID NO: 127) |
| 10-1 | GGCTGTCATCACCATTAGAAGTTTT | 24-2 | CTCATCTGCAACTTTCCATATTTCT |
| | (SEQ ID NO: 81) | | (SEQ ID NO: 128) |
| 10-2 | AATTACTGAAGAAGAGGCTGTCATC | 24-3 | ATTTCAGTTAGCAGCCTTACCTCAT |
| | (SEQ ID NO: 82) | | (SEQ ID NO: 129) |
| 10-3 | TAATATCTTTCAGGACAGGAGTACC | 25-1 | AGCCCAACCTGCAGTTAGAGAAGAT |
| | (SEQ ID NO: 83) | | (SEQ ID NO: 174) |
| 10-4 | GATCCAGCAACCGCCAACAACTGTC | 25-2 | TCTTCGCCTTACTGAGAACAGATCT |
| | (SEQ ID NO: 84) | | (SEQ ID NO: 175) |
| 10-5 | AGAACAAAAGAACTACCTTGCCTGC | 25-3 | AGAACATCTGAAACTCACACTGGAT |
| | (SEQ ID NO: 85) | | (SEQ ID NO: 176) |
| 11-1 | CTCCCATAATCACCATTAGAAGTGA | 25-EX | CTGGATCCAAATGAGCACTGGGTTA |
| | (SEQ ID NO: 86) | | (SEQ ID NO: 177) |
| 11-2 | ATTTTACCCTCTGAAGGCTCCAGTT | 26-1 | TACTGTGCAATCAGCAAATGCTTGT |
| | (SEQ ID NO: 87) | | (SEQ ID NO: 178) |
| 11-3 | ACAGAATGAAATTCTTCCACTGTGC | 26-2 | CCTGTGTTCACAGAGAATTACTGTG |
| | (SEQ ID NO: 88) | | (SEQ ID NO: 179) |
| 11-4 | GTGCCAGGCATAATCCAGGAAAACT | 26-3 | TCCAGCATTGCTTCTATCCTGTGTT |
| | (SEQ ID NO: 89) | | (SEQ ID NO: 180) |
| 11-5 | ATGCTTTGATGACGCTTCTGTATCT | 26-4 | GTTATAAAGACTCACCAAAAATTGT |
| | (SEQ ID NO: 90) | | (SEQ ID NO: 181) |
| 11-6 | TTTTCACATAGTTTCTTACCTCTTC | ASO-C | CCTCTTAGGTCAGTTACAATTTATA |
| | (SEQ ID NO: 91) | | (SEQ ID NO: 182) |
| 13-1 | TCTAGGTATCCAAAAGGAGAGTCTA | | |
| | (SEQ ID NO: 92) | | |

[0552] T84 cells were transfected with ASOs in DMEM/F12 media supplemented with 5% FBS and 1% PenStrep using Endo-Porter (Gene-Tools, 6 μl/ml) for 48 hours. Primary human bronchial epithelial (hBE) cells were transfected after differentiation on filter plates as previously described (12) using a 1-hour hypo-osmotic shock. The cells were maintained in Dulbecco's phosphate-buffered saline (DPBS) with ASO for 4 days until functional analysis.

[0553] RNA isolation, RT-PCR, and real-time qPCR: RNA was extracted from cells using TRIzol (Thermo Fisher Scientific). Reverse transcription was performed on total RNA using the GoScript Reverse Transcription System with an oligo-dT primer (Promega). Splicing was analyzed by radiolabeled PCR of resulting cDNA using GoTaq Green (Promega) supplemented with α-³²P-deoxycytidine triphosphate (dCTP). Primers for amplification are reported in Table 14. Reaction products were run on a 6% non-denaturing polyacrylamide gels and quantified using a Typhoon FLA 7000 phosphorimager (GE Healthcare) and ImageJ software.

[0554] Real-time qPCR was performed with PrimeTime Gene Expression Master Mix and PrimeTime qPCR probe assay kits for CFTR transcripts normalized to HPRT1 (IDT, Table 14). All reactions were analyzed in triplicate. Real-time PCR was performed on an Applied Biosystems (ABI) ViiA 7 Real-Time PCR System and analyzed by the ΔΔCT method.

TABLE 14
Primers and probes used to quantify mRNA splicing expression.

| Primers | Sequence (5′-3′) | Primers | Sequence (5′-3′) |
|---|---|---|---|
| 1: HCAI-CFTR- | ATGCAGCGCAGCCCCCTC | 25: hCFTR-ex10F | CTAATGGTGATGACAGCCTC |
| ex1F | (SEQ ID NO: 183) | | (SEQ ID NO: 206) |
| 2: HCAI-CFTR- | CGGTACTTCATCATCATGC | 26: hCFTR-ex12R | GCTCGTTGACCTCCACTCAG |
| ex6R | (SEQ ID NO: 254) | | (SEQ ID NO: 207) |
| 3: HCAI-CFTR- | ACCCTGAAGCTGAGCAGC | 27: hCFTR-ex12F | CACTGAGTGGAGGTCAACGA |
| ex5F | (SEQ ID NO: 184) | | (SEQ ID NO: 208) |
| 4: HCAI-CFTR- | CTCCTCCCAGAAGGCGGT | 28: hCFTR-ex14R | TCCAGGAGACAGGAGCATCT |
| ex9R | (SEQ ID NO: 185) | | (SEQ ID NO: 209) |
| 5: HCAI-CFTR- | GACCGAGCTGAAGCTGAC | 29: hCFTR-ex14F | AGGAGGCAGTCTGTCCTGAA |
| ex8F | (SEQ ID NO: 186) | | (SEQ ID NO: 210) |
| 6: HCAI-CFTR- | CTCCTCCAGCTGGCAGGC | 30: hCFTR-ex16R | CAGCACAACCAAAGAAGCAG |
| ex11R | (SEQ ID NO: 187) | | (SEQ ID NO: 211) |
| 7: HCAI-CFTR- | GACTTCCTGCAGAAGCAG | 31: hCFTR-ex19F | CAGTGCCAGTGATAGTG |
| ex9F | (SEQ ID NO: 188) | | (SEQ ID NO: 212) |
| 8: HCAI-CFTR- | CATCAGCTTGCACACGCA | 32: hCFTR-ex21R | CTCTTCCTTCTCCTTCTC |
| ex14RB | (SEQ ID NO: 189) | | (SEQ ID NO: 213) |
| 9: HCAI-CFTR- | GCAAAGTGAGCCTGGCCC | 33: hCFTR-ex21F | GGGCTGTAAACTCCAGCATA |
| ex14FE | (SEQ ID NO: 190) | | (SEQ ID NO: 214) |
| 10: HCAI-CFTR- | CCTCGCTCTCCAGCTGCTTCAGCTGC | 34: hCFTR-ex23R | GACACACCATCGATCTGG |
| ex19R | (SEQ ID NO: 191) | | (SEQ ID NO: 215) |
| 11: HCAI-CFTR- | GCGAGGGCGAGGGCCGCG | 35: hCFTR-ex22F | CCAAACCATACAAGAAT |
| ex21F | (SEQ ID NO: 192) | | (SEQ ID NO: 216) |
| 12: HCAI-CFTR- | ACGGGGTCCAGGTGGGCG | 36: hCFTR-ex24R | GATCACTCCACTGTTCAT |
| ex25R | (SEQ ID NO: 193) | | (SEQ ID NO: 217) |
| 13: hCFTR-ex1F | GCAGGCACCCAGAGTAGTAG | 37: hCFTR-ex23F | GGGAAGAGTACTTTGTTATC |
| | (SEQ ID NO: 194) | | (SEQ ID NO: 218) |
| 14: hCFTR-ex3R | GCCAGCTCTCTATCCCATTC | 38: hCFTR-ex25R | GTTCTATCACAGATCTGAG |
| | (SEQ ID NO: 195) | | (SEQ ID NO: 219) |
| 15: hCFTR-ex3F | GGGATAGAGAGCTGGCTTCA | 39: hCFTR-ex24F | CTTGGATCCCTATGAACA |
| | (SEQ ID NO: 196) | | (SEQ ID NO: 220) |
| 16: hCFTR-ex5R | TTGTTCAGGTTGTTGGAAAGG | 40: hCFTR-ex27R | CTAAAGCCTTGTATCTTG |
| | (SEQ ID NO: 197) | | (SEQ ID NO: 221) |
| 17: hCFTR-ex4F | CAAGGAGGAACGCTCTATCG | 41: hβ-actinFor | AAAGACCTGTACGCCAACAC |
| | (SEQ ID NO: 198) | | (SEQ ID NO: 156) |
| 18: hCFTR-ex6R | AGGCAGACGCCTGTAACAAC | 42: hβ-actinRev | GTCATACTCCTGCTTGCTGAT |
| | (SEQ ID NO: 199) | | (SEQ ID NO: 157) |
| 19: hCFTR-ex6F | ATGGGGCTAATCTGGGAGTT | 43: qhCFTR- | TGGCACCATTAAAGAAAATATCATCTT |
| | (SEQ ID NO: 200) | ex11WTF | (SEQ ID NO: 154) |
| 20: hCFTR-ex8R | CTGCCTTCCGAGTCAGTTTC | 44: qhCFTR- | CTCAGTGTGATTCCACCTTCTC |
| | (SEQ ID NO: 201) | ex12WTR | (SEQ ID NO: 155) |
| 21: hCFTR-ex8F | TCACCACCATCTCATTCTGC | 45: qhCFTR- | GGCACCATTAAAGAAAATATCATTGG |
| | (SEQ ID NO: 202) | ex11ΔFF | (SEQ ID NO: 168) |
| 22: hCFTR-ex10R | AAGAAGAGGCTGTCATCACCA | 46: qhCFTR- | CTCAGTGTGATTCCACCTTCT |
| | (SEQ ID NO: 203) | ex12ΔFR | (SEQ ID NO: 169) |
| 23: hCFTR-ex9F | TAACAGCCTTCTGGGAGGAG | 47: qhHPRT1For | GCGATGTCAATAGGACTCCAG |
| | (SEQ ID NO: 204) | | (SEQ ID NO: 170) |
| 24: hCFTR-ex11R | GGCATGCTTTGATGACGCTT | 48: qhHPRT1Rev | TTGTTGTAGGATATGCCCTTGA |
| | (SEQ ID NO: 205) | | (SEQ ID NO: 171) |

| | |
|---|---|
| hCFTR-DF508 | 56-FAM/ACAGAAGCG/ZEN/TCATCAAAGCATGCC/3IABKFQ (SEQ ID NO: 172) |
| hCFTR-F508 | 5.6-FAM/ACAGAAGCG/ZEN/TCATCAAAGCATGCC/3IABKFQ (SEQ ID NO: 158) |
| hHPRT1 | 5HEX/AGCCTAAGA/ZEN/TGAGAGTTCAAGTTGAGTTTGG/3IABKFQ (SEQ ID NO: 173) |

[0555] Protein isolation and immunoblot analysis: Cell lysates were prepared using NP-40 lysis buffer (1% Igepal. 150 mM NaCl. 50 mM Tris-HCl pH7.6) supplemented with 1× protease inhibitor cocktail (Sigma-Aldrich, cat #11836170001). Protein concentration was measured using a Coomassic (Bradford) protein assay (Thermo Fisher, cat #23200). Cell lysates were prepared with 4X NuPage LDS sample buffer (Invitrogen) for a final concentration of 1-2 mg/ml, incubated at 37° C. for 5 minutes, and loaded into a 4-12% Bis-Tris gel (Criterion) for SDS-PAGE separation in 1X MOPS buffer. Samples were transferred in 1X CAPS buffer to polyvinylidene difluoride membranes. Protein was detected using primary anti-CFTR antibodies 570 or 596 (Riordan lab UNC. Cystic Fibrosis Foundation, diluted 1:1000) and anti-β-actin (C4, Santa Cruz. Biotechnology, diluted 1:2000). Secondary anti-mouse poly-HRP was added for chemiluminescent detection with HRP substrate (CFTR: Femto.-actin: Classico; Immobulin. Sigma). Signal was quantified with ImageJ software.

[0556] Automated conductance/equivalent current assay: FRT cells lines and primary hBE cells were treated with VX-445+VX-661 (1 μM+3 μM for hBEs or 3 μM+3.5 μM for FRTs. Selleckchem) or vehicle (0.1% or 0.2% DMSO) at 37° C. for 24 hours. Cells were switched from culture media to HEPES-buffered (pH 7.4) F12 Coon's modification running media (Sigma. F6636) apically and basolaterally and allowed to equilibrate for one hour at 37° C. without CO₂. For functional measurements the transepithelial voltage (Vt) and resistance (Rt) measurements were recorded at 37° C. with a 24-channel TECC robotic system (EP Design, Belgium) as previously described (12.16). Benzamil (6 μM), forskolin (10 μM). VX-770 (1 μM) with or without ASP-11 (20 μM), and Inh-172 (20 μM) or bumetanide (20 μM) additions were added sequentially. Conductance (Gt) was calculated by the reciprocal of the recorded Rt (Gt=1/Rt) and plotted as conductance traces (FIG. 40C). Equivalent currents from hBE donors were assessed similarly and calculated using Ohm's law (Ieq=Vt/Rt). Area under the curve measurements of forskolin, forskolin+VX-770, or forskolin+VX-770+ASP-11, were calculated using a one-third trapezoidal rule for each test period using Microsoft Excel.

[0557] Immunofluorescence Imaging: FRT cell lines grown on high precision glass 12 mm circle coverslips (No. 1.5H) (Paul Marlenfeld GmbH) were washed with PBS and fixed with 4% paraformaldehyde in PBS for 10 min at room temperature. Cells were permeabilized with 0.2% Triton X-100 in PBS for 5 min on ice. Subsequently, the cells were incubated in 3% bovine serum albumin for 20 minutes. Cells were incubated with the monoclonal anti-CFTR antibody (570, Riordan lab UNC. 1:500) and rabbit polyclonal anti-Claudin antibody (1:100. Zymed) for one hour. Cells were then incubated with goat anti-mouse secondary antibody conjugated with Alexa 488 and goat anti-rabbit secondary antibody conjugated with Alexa 594 (Invitrogen. 1:1000) for 1 hour and mounted using ProLong Gold antifade mounting reagent with DAPI (Life Technologies). Cells were observed on Zeiss Elyra structured illumination microscope (SIM) using a 63×1.40 NA objective using 7.-90 nm sectioning. In the axial direction, channel alignment was performed using 100 nm tetraspeck beads. Final images were prepared using Zeiss Zen software.

[0558] Statistics: Statistical analyses were performed using GraphPad PRISM 10.2.3 or Microsoft Excel. Specific statistical tests used in each experiment are reported in the figure legends.

### Results

### Systematic Deletion of CFTR Symmetrical Exons Reveals Functional Protein Isoforms

[0559] CFTR has 13 symmetrical exons that can be removed without disrupting the protein open reading frame. Additionally, the reading frame is maintained when exons 25 and 26 are eliminated together (FIG. 35A). It has been previously shown that ASO-induced skipping of exon 23 results in a partially functional CFTR protein when co-treated with established HEMTs (12-14). To identify additional pathogenic variants that could potentially be treated using this therapeutic approach, CFTR protein lacking each of the other symmetrical exons was analyzed. A series of CFTR plasmids with individual deletions of each of the 13 exons and both exons 25 and 26 together (CFTR-Δex) was created and analyzed CFTR expression and function after stable transfection into Fischer Rat Thyroid (FRT) cells, which do not express endogenous CFTR. CFTR-Δex isoform expression was confirmed by RT-PCR (FIG. 42).

[0560] FRT CFTR-Δex cell lines were grown to confluence on trans-well filter plates to assess the protein isoforms cAMP-activated conductance capabilities across the plasma membrane via forskolin stimulation. Responsiveness to HEMTs was also screened, including ETI and the novel potentiator Asp-11, which has been shown to work in synergy with VX-770 to further increase the function of CFTR protein isoforms, especially those that disrupt the second nucleic binding domain (NBD2) of CFTR (17,18). None of the expressed CFTR isoforms had measurable conductance in the FRT cells in the absence of HEMTs (white bars, FIG. 35C and FIG. 40). Treatment with VX-770 alone (grey bars, FIG. 35C) did not result in measurable conductance, however, co-potentiation with Asp-11 in combination with VX-770 (blue bars, FIG. 35C) resulted in significant forskolin-induced conductance from CFTR-423 and CFTR-A24 compared to vehicle-treated cells. Cells expressing CFTR-Δ23. CFTR-A24, and CFTR-425/26 had significant conductance following ETI treatment (grey hashed bars, FIG. 35C) and all three deletion isoforms responded most robustly when treated with a combination of Asp-11 and ETI (blue hashed bars, FIG. 35C).

[0561] Conductance activity did not correlate with expression as immunoblot analysis of the C-terminal deletion protein isoforms did not show significant expression differences above the other deletion isoforms (FIG. 42). Preliminary analysis of protein processing showed an increase in mature CFTR Band C protein after ETI treatment in comparison to the immature Band B, indicative of recovery of proper CFTR folding and trafficking. These results provide evidence that this activity was specific to modulator effects on the isoforms (FIG. 42). Additionally, immunofluorescence analysis of cells expressing CFTR-Δex23, 24 and 25/26 showed appropriate localization of the expressed proteins to the cell membrane after ETI treatment (FIG. 41). Taken together, these findings indicate that CFTR isoforms lacking exons 23, 24, or 25 and 26 together can transport chloride across the membrane when treated with HEMTs, making them good candidates for combined HEMT and ASO-mediated exon skipping therapies.

### Splice-Switching ASOs Induce Skipping of CFTR Symmetrical Exons

[0562] Next splice-switching ASOs that target each symmetrical exon for skipping were tested. A series of ASOs for each exon were designed to base-pair with the canonical acceptor and donor splice sites or putative exonic splicing enhancer sequences and further selected for their predicted binding affinity (FIG. 36A). ASOs were tested for their ability to induce exon skipping of endogenous CFTR-WT pre-mRNA by transfection into T84 cells. RT-PCR analysis of RNA isolated after 48 hours of incubation identified at least one ASO that was effective at skipping each target exon, except exon 26 where combination with exon 25 skipping ASOs was necessary (FIG. 36B, FIG. 42).

[0563] This functional screen indicated that only isoforms lacking exon 23, 24 or 25/26 are responsive to HEMT and thus, focus was put on ASOs targeting these exons. An ASO that base-pairs to the 5′ splice site region of exon 23 (ASO-23A) induces skipping of exon 23, but also causes splicing to a cryptic splice site that results in an out-of-frame CFTR mRNA. Additional treatment with an ASO that base-pairs at the cryptic splice site (ASO-23B) eliminates cryptic splicing and greatly enhances skipping of exon 23 in a dose-dependent manner (FIG. 36C) (12). Likewise, a robust dose-dependent increase in exon 24 was observed following treatment with a single ASO, ASO-24-3 (FIG. 36D). Treatment with ASO-25-2 or 25-EX, which targets the CFTR-E1371X variant, alone or in combination with ASO-26-4 (ASO-25EX+26) resulted in the skipping of exon 25 or 26 individually or both exons 25 and 26 together (Δ25/26) (FIG. 36E, FIG. 43). Though dual skipping of exon 25 and 26 was not induced at a high level, higher dosing of ASO-25EX+26 provided some improvement (FIG. 36E). Because elimination of exon 25 alone would lead to PTCs in the penultimate exon 26, which may escape NMD (1), ASO treatment could provide sufficient splice modulation to increase CFTR mRNA and protein for further rescue with HEMTs.

Functional CFTR Isoforms Generated by ASO-Induced Symmetrical Exon Skipping in cells derived from CF patient airways

[0564] It was recently reported that treatment with ASOs that induce exon 23 skipping can rescue CFTR function in cells homozygous for CFTR-W1282X (12). This rescue required treatment with ETI. This disclosure tested whether compound heterozygous cells expressing only a single copy of CFTR-W1282X along with another variant that is associated with minimally functional CFTR could produce sufficient CFTR-Δex23 to provide a functional benefit in genotypes that aren't currently approved for HEMTs. Co-potentiation with Asp-11 was also tested, to assess whether greater functional rescue could be achieved by modulator optimization. CFTR function was assessed via equivalent current analysis in human bronchial epithelial cells (hBE) isolated from pwCF.

[0565] Cells from donors expressing two copies of CFTR-W1282X or with one copy and another nonsense variant, CFTR-R553X or CFTR-R1162X, were treated with vehicle, ASO-C, or ASO-23AB with or without Asp-11 and ETI. In all donors, treatment with ASO-23AB resulted in a significant increase in chloride currents over the control ASO when treated with ETI, and co-treatment with Asp-11 resulted in an even greater ASO-induced rescue of CFTR function (FIG. 37A). In donor cells with CFTR-W1282X and CFTR-F508del, ASO-23AB treatment had little effect on the rescue already achieved by ETI alone, similar to previous results (12). Interestingly in these cells, ASO-23AB and co-potentiator treatment with VX-770 and Asp-11 together resulted in significant rescue of CFTR function, but Asp-11 addition with ETI lowered functional recovery (FIG. 43). This effect on ETI-dependent function was also observed in cells homozygous for CFTR-F508del, where ASO-23AB treatment had no effect on modulator rescue (FIG. 43). Co-potentiation alone provided a significant rescue in cells from the CFTR-W1282X/CFTR-R553X donor (FIG. 37A). These results suggest that HEMT optimization could both provide significant rescue for minimal function variants and further improve the ASO-induced CFTR-Δex23 isoform function. The results also caution that effects on the second CFTR allele should be considered, as differential modulator effects may occur.

[0566] It has been reported that ASO-induced exon skipping could have partial allele specificity for CFTR-W1282X due to the elimination of splicing factor binding sites (12). Similarly here, ASO treatment induced ˜80% exon 23 skipping in cells homozygous for CFTR-W1282X (FIG. 37B). In compound heterozygous cells, ASO treatment induced ˜30-60% exon skipping (FIG. 37B, FIG. 43). In cells homozygous for CFTR-F508del, ASO-23AB treatment induced less than 20% skipping of the wild-type exon 23 (FIG. 43), providing strong evidence that exon 23 containing the W1282X sequence is more susceptible to ASO-23AB-induced skipping than the wild-type sequence. These results suggest that ASO-induced exon 23 skipping could be therapeutic for pwCF expressing at least one copy of CFTR-W1282X and not eligible for, or responsive to, current therapeutics.

[0567] Skipping of exon 24 also results in a CFTR protein that is functional when treated with HEMTs (FIG. 35). Thus, the effect of ASO-induced exon 24 skipping on CFTR function in patient donor cells was also evaluated. Unfortunately, airway cells from a donor with a terminating variant in exon 24 were not available. Instead, ASO-24-3 was tested in hBE cells derived from a person with the CFTR-N1303K variant, a CF-associated missense variant in exon 24 that results in a protein with defective biogenesis and gating abnormalities. This variant has shown some response to HEMTs but is not currently FDA-approved for HEMT treatment (17,19,20). Given the activity of the CFTR-A24 isoform (FIG. 35), it was hypothesized that CFTR-424 would have greater activity than CFTR-N1303K and, because of this enhanced activity, ASO-induced skipping of exon 24 would result in elevated currents in the donor cells. Compound heterozygote hBE cells expressing CFTR-N1303K and CFTR-F508del were transfected with ASO-24-3 and treated with ETI and Asp-11. Compared to the control ASO, there was little effect of ASO-24-3 treatment on ETI rescue of CFTR activity and Asp-11 had no additional effect (FIG. 37C). This result suggests that ASO-induced skipping of exon 24 will not provide a therapeutic benefit over ETI to individuals with CFTR-N1303K and CFTR-F508del. However, ASO-24-3 and co-potentiator treatment did result in a significant rescue over VX-770 alone (FIG. 37C) despite inducing only modest (˜20%) exon 24 skipping (FIG. 37D), suggesting that further optimization of ASO-induced skipping could result in greater activity, particularly in the context of other CF variants that are not responsive to ETI. Nonetheless, CFTR-N1303K is an imperfect model for exon skipping therapies as there is no evidence of mRNA degradation. Further testing in donor cells expressing variants in exon 24 that destabilize CFTR mRNA is needed to assess the efficacy of ASO-induced exon 24 skipping.

### A Potential Functional CFTR Isoform Generated by ASO-Induced Multiexon Skipping

[0568] Similar to CFTR-D23 and CFTR-D24. CFTR-D25/26 retains conductance when treated with ETI and is responsive to co-potentiation with Asp-11 (FIG. 35C). ASO-25-EX alone induces robust exon 25 skipping (FIG. 36B), which could be therapeutic if the downstream PTC in the penultimate exon does not activate NMD. The combination of ASO-26-4 with ASO-25EX (ASO-25EX+26) results in modest skipping of both exons 25 and 26 (FIG. 36E). To test these ASOs further, hBE cells that are compound heterozygous for CFTR-E1371X, a PTC in exon 25, and CFTR-F508del, were treated with ASO-25-EX alone or ASO-25EX+26 and assessed for CFTR activity in the presence or absence of ETI and Asp-11. ASO treatment had little effect on activity without ETI treatment (FIG. 38A). With ETI. ASO-25EX+26 showed no additional rescue and ASO-25EX resulted in slightly lower function compared to the control ASO. As seen before in cells expressing CFTR-F508del. Asp-11 treatment reduced ETI response but did show a significant increase in function in combination with ASO-25EX+26 treatment compared to control treated cells, which may suggest that Asp-11 has some specificity for CFTR-425/26, which could lead to elevated function in genotypes heterozygous with variants other than CFTR-F508del (FIG. 38A). ASO-25EX treatment resulted in ˜10-20% exon 25 skipping alone or in combination with ASO-26-4 and ASO-25EX+26 induced a low level of skipping of both exons 25 and 26 (FIG. 38C). Allele-specific qPCR analysis revealed a trend of increased CFTR-E1371X mRNA expression with ASO-25-EX+26 treatment despite the minimal skipping, suggesting that ASO treatment may effectively stabilize mRNA produced from CFTR-E1371X, presumably due to the removal of the PTC in the ASO-induced CFTR25/26 isoform (FIG. 38C). The upward trend in mRNA levels, and the modest effect on CFTR function with ETI and Asp-11 treatment suggests that further optimization of ASO-induced exon 25 and 26 skipping could be beneficial to people with terminating variants in exons 25 or 26.

Inactive CFTR Produced from ASO-Induced Exon 22 Skipping Confirms Functional Limits of Exon-Deleted Isoforms

[0569] The systematic screening of protein isoforms engineered by ASO-induced exon skipping revealed that CFTR C-terminal isoforms lacking amino acids encoded by exons 23, 24, or 25 and 26, but not exon 22 or any other upstream exon, are functional as chloride channels when treated with ETI (FIG. 35). To confirm the results found in this functional screen, ASO-induced skipping of exon 22 using ASO-22-1 was tested in hBE cells derived from two pwCF expressing CFTR-R1162X (compound heterozygous with W1282X) or CFTR-c.3658delC (p.K1177SfsX15) (compound heterozygous with F508del). In the CFTR-c.3658delC cells, ASO-22-1 treatment did not improve activity relative to that already achieved by ETI treatment alone and Asp-11 had no additional effects (FIG. 39A). In the CFTR-R1162X cells, ETI and Asp-11 treatment significantly improved CFTR function in control treated cells, likely due to the effect on CFTR-W1282X, but treatment with ASO-22-1 eliminated this response (FIG. 39A). Lack of functional recovery was not due to insufficient skipping of exon 22 as treatment with ASO-22-1 resulted in ˜30% exon 22 skipping in CFTR-3659delC cells and ˜70% in CFTR-R1162X cells (FIG. 39B). These results, along with the conductance activity measured from CFTR-422 in FRT cells, suggest that ASO-induced skipping of exon 22 does not result in an active CFTR isoform and that the protein domains encoded by exons 1-22, are likely essential for functional activity and rescue with HEMTs. These results define the boundaries of any potential exon-skipping therapy for CF as sequences downstream of exon 22 and suggest that truncation or deletions after CFTR exon 22 could provide a therapeutic benefit for all variants effecting expression in CFTR exons 23-27.

### DISCUSSION

[0570] Identifying targets of ASO-mediated exon skipping that can restore functional potential to an inactivated protein is relevant to therapeutic development for any disease caused by pathogenic variants that result in PTCs and destabilize the mRNA and/or truncate the protein, including CF. To this end, this study demonstrates the systematic testing of each so-called skippable (i.e. symmetrical) exon of the CFTR gene for its functional dispensability and identifies four exons at the 3′ end of the transcript as viable targets for restoring function by ASO-induced exon skipping.

[0571] The potential of ASO-induced exon skipping for treating CF caused by CFTR-W1282X has been previously demonstrated (12-14). Additional testing of this approach in patient cells expressing genotypes not currently eligible for HEMTs provides strong evidence that combining ASO treatment with HEMTs will provide therapeutic benefit to these patients and others that have terminating variants in exon 23 (FIG. 37). The testing of additional exon deletion isoforms in comparison to the CFTR-Δex23 protein product, demonstrates that CFTR-Δex24 and CFTR-Δex25/26 have comparable levels of function and HEMT response (FIG. 35), providing evidence that this strategy could be beneficial to terminating variants in additional C-terminal exons. The subsequent screening identifies ASOs that induce skipping of these exons (FIG. 36).

[0572] Further ASO design and testing in CF patient cells is needed to advance these approaches. However, screening is limited by a lack of patient cells with required genotypes needed for functional testing, limiting our analysis to cells with less-than-ideal CFTR genotypes for definitively evaluating therapeutic benefit. As such, no additional benefit over ETI was observed with ASO-mediated exon 24 skipping in patient cells expressing CFTR-N1303K with CFTR-F508del (FIG. 37). However, because CFTR-N1303K has not been shown to compromise CFTR expression, it is a sub-optimal target for this strategy. Furthermore, the tested donor cells co-expression with CFTR-F508del makes it difficult to assess ASO+HEMT efficacy against the CFTR-F508del ETI response. Significant ASO-specific rescue was seen with co-potentiation treatment alone, suggesting modulated CFTR-424 has some benefit. However, further testing in patients with terminating variants in exon 24 and other undruggable genotypes is needed. Regarding exon 25/26 skipping, responses from patient cells expressing CFTR-E1371X revealed a significant response from ASO-25EX+26 compared to ASO-C treated cells with Asp-11 addition to ETI. However, again, ASO-specific functional rescue of CFTR-E1371X directly was difficult to assess with CFTR-F508del. These results, as well as a trend of increased expression of CFTR-E1371X RNA despite low levels of exon 25/26 skipping, suggest that ASO treatment could be promising for terminating variants in these exons with further optimization (FIG. 38).

[0573] In addition to ASOs, a number of alternative therapeutic strategies are being explored to improve stability and translation of mRNA with terminating mutations, though currently none have been successfully implemented in patients. Current strategies involve approaches to block NMD and/or increase translational read-through of PTCs to recover full-length protein expression (21-27). One downfall of such candidate therapeutics is that, global dysregulation of these processes could be detrimental if specificity for the PTC-containing transcript is not achieved. ASOs offer some advantages for design and development that present the potential for a relatively short development timeline, which is especially critical to individuals with these variants that currently have no good treatment options, including a large population of pwCF.

[0574] ASOs may offer some advantage over other strategies as a validated therapeutic platform, proven largely safe in humans. In-frame exon skipping strategies utilizing ASOs have been successfully applied to address PTCs in DMD (2) and explored in other disease models (36-42). ASOs also offer a potential advantage over larger therapeutic cargo in delivery to target tissues. ASO delivery to the respiratory system, one of the primary targets for CF therapeutics, has been demonstrated clinically for asthma and other inflammatory lung conditions (43) and most recently as an antiviral approach for Sars-CoV-2 (44,45). Naked ASOs have been successfully delivered to the lung and enter multiple cell types including CFTR expressing epithelial cells (46-49), though questions about whether the targeted cell-types are relevant for CF treatment remain (50). ASOs have long-lasting effects in primary hBE cells isolated from pwCF (16), and could have similar durability in vivo considering ASO activity for other indications can last weeks to months in terminally differentiated cells (51,52). Lung epithelia may turnover relatively slowly, with estimates of 6-18 months (53). Aerosolization of ASOs as a delivery modality has been demonstrated and targeted CFTR transcripts in both a CF-like lung disease model in mice and monkeys as well as pwCF (48,49,54,55). However, ASOs for CF have not yet advanced beyond clinical trials. Additionally, people with terminating variants tend to have severe disease phenotypes in other organs, so systemic delivery of ASOs must also be considered (56). Intravenous and subcutaneous ASO injections are currently used to treat other diseases, demonstrating the potential for systemic delivery of ASOs for CF (57-59). Successful ASO delivery to the affected organs in pwCF and target engagement with CFTR will be essential to therapeutic success.

[0575] In addition to therapeutic discovery, exploring the effects of exon deletions can provide information on protein function that can inform and facilitate future drug discovery and development. The systematic screening of CFTR exon deletion isoforms as disclosed herein indicates that the C-terminal exons are not essential for the fundamental function of CFTR when HEMTs are applied, a result confirmed by ASO testing in CF airway cells. Previous studies have shown that proteins with C-terminal truncations up to amino acid 1217 retain partial surface expression and function and are responsive to HEMTs (60-63). The domains encoded by exons 23, 24, and 25/26 encompass parts of NBD2 (NBD2=1203-1440, 423=41240-1291, 424=41292-1321, and Δ2526=A1321-1413), and the retained function of these exon deletions, but not exons upstream, is consistent with these reports (FIG. 35C). CFTR-Δ23 and CFTR-424 also retain critical sites in NBD2 for ATP-binding and NBD dimerization (64), which are eliminated in CFTR-425/26. Similar conductance levels between the isoforms (FIG. 35C) suggest that, if this region is critical for dimerization, NBD dimerization is not critical for proper CFTR function with HEMT treatment. Furthermore, removal of PTCs in these exons allows for translation to the C-terminus, which includes amino acids important for stability, gating, and localization (63,65-67). Overall, the functional data shows that elimination of exon 23, 24, or 25/26 results in CFTR protein responsive to HEMT rescue and suggests that ASO-mediated exon skipping of CFTR after exon 22 could be a therapeutic pathway. In addition, these results provide evidence that pwCF with splicing mutations that eliminate exons 23-26 are good candidates for ETI treatment if not currently approved for its use.

[0576] Co-potentiation with Asp-11, previously shown to increase the activity of other variants that are unresponsive to ETI, further enhanced CFTR isoform function (FIG. 35-39) (17,18). This result suggests that new modulator discovery focused on enhancing function from CFTR deletion isoforms could provide additional benefit to ASO-induced rescue of expression, especially considering that the binding sites of the modulators are eliminated by some deletions. For example, the deletion of exon 20 eliminates a potential VX-770 binding pocket and, though not responsive to VX-770, might be responsive to alternative potentiators (69). Class I correctors bind in the first transmembrane domain (TMD1) and could be affected by several of the deletions, including exon 9 which has been previously explored for exon skipping and showed no response to the class 1 corrector VX-809 (70,71). The differing binding sites of VX-445 and VX-661 improve the efficacy of ETI and similar approaches to modulator design may be beneficial for each deletion construct (72).

[0577] Taken together, these results not only inform CF drug development, but also have important implications for treating other diseases caused by terminating variants. Treating such variants by eliminating the exons they reside in and increasing productive protein expression could be a broadly applied therapeutic strategy. This investigation into the effects of symmetrical exon removal on CFTR expression and function provides a roadmap for the systematic evaluation of symmetrical exon deletion, revealing additional ASO therapeutic targets for CF drug development and instructing on a therapeutic strategy for discovering treatment approaches for other diseases.

### REFERENCES

[0578] 1. Das, R. and Panigrahi, G. K. (2024) Messenger RNA Surveillance: Current Understanding, Regulatory Mechanisms, and Future Implications. Mol Biotechnol.
[0579] 2. Gupta, S., Sharma, S. N., Kundu, J., Pattanayak, S. and Sinha, S. (2023) Morpholino oligonucleotide-mediated exon skipping for DMD treatment: Past insights, present challenges and future perspectives. J Biosci, 48.
[0580] 3. Magen, A. and Ast, G. (2005) The importance of being divisible by three in alternative splicing. Nucleic Acids Res, 33, 5574-5582.
[0581] 4. Cheng, S. H., Gregory, R.J., Marshall, J., Paul, S., Souza, D. W., White, G. A., O'Riordan, C. R. and Smith, A. E. (1990) Defective intracellular transport and processing of CFTR is the molecular basis of most cystic fibrosis. Cell, 63, 827-834.
[0582] 5. Guo, J., Garratt, A. and Hill, A. (2022) Worldwide rates of diagnosis and effective treatment for cystic fibrosis. J Cyst Fibros, 21, 456-462.
[0583] 6. Van Goor, F., Hadida, S., Grootenhuis, P. D. J., Burton, B., Stack, J. H., Straley, K. S., Decker, C. J., Miller, M., McCartney, J., Olson, E. R. et al. (2011) Correction of the F508del-CFTR protein processing defect in vitro by the investigational drug VX-809. Proceedings of the National Academy of Sciences of the United States of America, 108, 18843-18848.
[0584] 7. Ferreira, F. C., Buarque, C. D. and Lopes-Pacheco, M. (2024) Organic Synthesis and Current Understanding of the Mechanisms of CFTR Modulator Drugs Ivacaftor, Tezacaftor, and Elexacaftor. Molecules, 29.
[0585] 8. Van Goor, F., Hadida, S., Grootenhuis, P. D. J., Burton, B., Cao, D., Neuberger, T., Turnbull, A., Singh, A., Joubran, J., Hazlewood, A. et al. (2009) Rescue of CF airway epithelial cell function in vitro by a CFTR potentiator, VX-770. Proceedings of the National Academy of Sciences, 106, 18825-18830.
[0586] 9. Bear, C. E. (2020) A Therapy for Most with Cystic Fibrosis. Cell, 180, 211-211.
[0587] 10. De Boeck, K., Zolin, A., Cuppens, H., Olesen, H. V. and Viviani, L. (2014) The relative frequency of CFTR mutation classes in European patients with cystic fibrosis. Journal of cystic fibrosis: official journal of the European Cystic Fibrosis Society, 13, 403-409.
[0588] 11. Cutting, G. R., Castellani, C., Corey, M., Lewis, M. H., Penland, C. M., Raraigh, K. S., Rommens, J. M. and Sosnay, P.R. (2013), Cftr2.
[0589] 12. Michaels, W. E., Pena-Rasgado, C., Kotaria, R., Bridges, R. J. and Hastings, M. L. (2022) Open reading frame correction using splice-switching antisense oligonucleotides for the treatment of cystic fibrosis. Proc Natl Acad Sci USA, 119, e2114886119.
[0590] 13. Kim, Y. J., Sivetz, N., Layne, J., Voss, D. M., Yang, L., Zhang, Q. and Krainer, A. R. (2022) Exon-skipping antisense oligonucleotides for cystic fibrosis therapy. Proc Natl Acad Sci U S A, 119.
[0591] 14. Oren, Y. S., Avizur-Barchad, O., Ozeri-Galai, E., Elgrabli, R., Schirelman, M. R., Blinder, T., Stampfer, C. D., Ordan, M., Laselva, O., Cohen-Cymberknoh, M. et al. (2022) Antisense oligonucleotide splicing modulation as a novel Cystic Fibrosis therapeutic approach for the W1282X nonsense mutation. J Cyst Fibros, 21, 630-636.
[0592] 15. Shah, K., Cheng, Y., Hahn, B., Bridges, R., Bradbury, N. A. and Mueller, D. M. (2015) Synonymous Codon Usage Affects the Expression of Wild Type and F508del CFTR. Journal of Molecular Biology, 427, 1464-1479.
[0593] 16. Michaels, W. E., Bridges, R. J. and Hastings, M. L. (2020) Antisense oligonucleotide-mediated correction of CFTR splicing improves chloride secretion in cystic fibrosis patient-derived bronchial epithelial cells. Nucleic Acids Res, 48, 7454-7467.
[0594] 17. Phuan, P. W., Tan, J. A., Rivera, A. A., Zlock, L., Nielson, D. W., Finkbeiner, W. E., Haggie, P. M. and Verkman, A.S. (2019) Nanomolar-potency ‘co-potentiator’ therapy for cystic fibrosis caused by a defined subset of minimal function CFTR mutants. Sci Rep, 9, 17640.
[0595] 18. Phuan, P. W., Son, J. H., Tan, J. A., Li, C., Musante, I., Zlock, L., Nielson, D. W., Finkbeiner, W. E., Kurth, M. J., Galietta, L. J. et al. (2018) Combination potentiator (‘co-potentiator’) therapy for CF caused by CFTR mutants, including N1303K, that are poorly responsive to single potentiators. J Cyst Fibros, 17, 595-606.
[0596] 19. Sadras, I., Kerem, E., Livnat, G., Sarouk, I., Breuer, O., Reiter, J., Gileles-Hillel, A., Inbar, O., Cohen, M., Gamliel, A. et al. (2023) Clinical and functional efficacy of elexacaftor/tezacaftor/ivacaftor in people with cystic fibrosis carrying the N1303K mutation. J Cyst Fibros, 22, 1062-1069.
[0597] 20. Destefano, S., Gees, M. and Hwang, T.-C. (2018) Physiological and pharmacological characterization of the N1303K mutant CFTR. Journal of Cystic Fibrosis, 17, 573-581.
[0598] 21. Venturini, A., Borrelli, A., Musante, I., Scudieri, P., Capurro, V., Renda, M., Pedemonte, N. and Galietta, L. J. V. (2021) Comprehensive Analysis of Combinatorial Pharmacological Treatments to Correct Nonsense Mutations in the CFTR Gene. Int J Mol Sci, 22.
[0599] 22. Ko, W., Porter, J. J., Sipple, M. T., Edwards, K. M. and Lueck, J.D. (2022) Efficient suppression of endogenous CFTR nonsense mutations using anticodon-engineered transfer RNAs. Mol Ther Nucleic Acids, 28, 685-701.
[0600] 23. Albers, S., Allen, E. C., Bharti, N., Davyt, M., Joshi, D., Perez-Garcia, C.G., Santos, L., Mukthavaram, R., Delgado-Toscano, M. A., Molina, B. et al. (2023) Engineered tRNAs suppress nonsense mutations in cells and in vivo. Nature, 618, 842-848.
[0601] 24. Carollo, P.S., Tutone, M., Culletta, G., Fiduccia, I., Corrao, F., Pibiri, I., Di Leonardo, A., Zizzo, M. G., Melfi, R., Pace, A. et al. (2023) Investigating the Inhibition of FTSJ1, a Tryptophan tRNA-Specific 2′-O-Methyltransferase by NV TRIDs, as a Mechanism of Readthrough in Nonsense Mutated CFTR. Int J Mol Sci, 24.
[0602] 25. Leubitz, A., Vanhoutte, F., Hu, M.-Y., Porter, K., Gordon, E., Tencer, K., Campbell, K., Banks, K. and Haverty, T. (2021) A Randomized, Double-Blind, Placebo-Controlled, Multiple Dose Escalation Study to Evaluate the Safety and Pharmacokinetics of ELX-02 in Healthy Subjects. Clinical pharmacology in drug development, 10, 859-869.
[0603] 26. Temaj, G., Telkoparan-Akillilar, P., Nuhii, N., Chichiarelli, S., Saha, S. and Saso, L. (2023) Recoding of Nonsense Mutation as a Pharmacological Strategy. Biomedicines, 11.
[0604] 27. Keenan, M. M., Huang, L., Jordan, N. J., Wong, E., Cheng, Y., Valley, H. C., Mahiou, J., Liang, F., Bihler, H., Mense, M. et al. (2019) Nonsense-mediated RNA Decay Pathway Inhibition Restores Expression and Function of W1282X CFTR. Am J Respir Cell Mol Biol, 61, 290-300.
[0605] 28. Kim, Y. J., Nomakuchi, T., Papaleonidopoulou, F., Yang, L., Zhang, Q. and Krainer, A. R. (2022) Gene-specific nonsense-mediated mRNA decay targeting for cystic fibrosis therapy. Nat Commun, 13, 2978.
[0606] 29. Nomakuchi, T. T., Rigo, F., Aznarez, I. and Krainer, A. R. (2016) Antisense oligonucleotide-directed inhibition of nonsense-mediated mRNA decay. Nature Biotechnology, 34, 164-166.
[0607] 30. Lomunova, M. A. and Gershovich, P.M. (2023) Gene Therapy for Cystic Fibrosis: Recent Advances and Future Prospects. Acta Naturae, 15, 20-31.
[0608] 31. Li, C., Liu, Z., Anderson, J., Liu, Z., Tang, L., Li, Y., Peng, N., Chen, J., Liu, X., Fu, L. et al. (2023) Prime editing-mediated correction of the CFTR W1282X mutation in iPSCs and derived airway epithelial cells. PLOS One, 18, e0295009.
[0609] 32. Mention, K., Cavusoglu-Doran, K., Joynt, A. T., Santos, L., Sanz, D., Eastman, A. C., Merlo, C., Langfelder-Schwind, E., Scallan, M. F., Farinha, C. M. et al. (2023) Use of adenine base editing and homology-independent targeted integration strategies to correct the cystic fibrosis causing variant, W1282X. Hum Mol Genet, 32, 3237-3248.
[0610] 33. Belbellaa, B., Reutenauer, L., Messaddeq, N., Monassier, L. and Puccio, H. (2020) High Levels of Frataxin Overexpression Lead to Mitochondrial and Cardiac Toxicity in Mouse Models. Mol Ther Methods Clin Dev, 19, 120-138.
[0611] 34. Rowe, S. M., Zuckerman, J. B., Dorgan, D., Lascano, J., McCoy, K., Jain, M., Schechter, M. S., Lommatzsch, S., Indihar, V., Lechtzin, N. et al. (2023) Inhaled mRNA therapy for treatment of cystic fibrosis: Interim results of a randomized, double-blind, placebo-controlled phase ½ clinical study. J Cyst Fibros, 22, 656-664.
[0612] 35. Vaidyanathan, S., Kerschner, J. L., Paranjapye, A., Sinha, V., Lin, B., Bedrosian, T. A., Thrasher, A. J., Turchiano, G., Harris, A. and Porteus, M. H. (2024) Investigating adverse genomic and regulatory changes caused by replacement of the full-length CFTR cDNA using Cas9 and AAV. Mol Ther Nucleic Acids, 35, 102134.
[0613] 36. Molinari, E., Ramsbottom, S.A., Srivastava, S., Booth, P., Alkanderi, S., McLafferty, S. M., Devlin, L. A., White, K., Gunay-Aygun, M., Miles, C. G. et al. (2019) Targeted exon skipping rescues ciliary protein composition defects in Joubert syndrome patient fibroblasts. Sci Rep, 9, 10828.
[0614] 37. Leier, A., Moore, M., Liu, H., Daniel, M., Hyde, A. M., Messiaen, L., Korf, B. R., Selvakumaran, J., Ciszewski, L., Lambert, L. et al. (2022) Targeted exon skipping of NF1 exon 17 as a therapeutic for neurofibromatosis type I. Mol Ther Nucleic Acids, 28, 261-278. Ablinger, M., Lettner, T., Friedl, N., Potocki, H., Palmetzhofer, T., Koller, U., Illmer, J., 38. Liemberger, B., Hainzl, S., Klausegger, A. et al. (2021) Personalized Development of Antisense Oligonucleotides for Exon Skipping Restores Type XVII Collagen Expression in Junctional Epidermolysis Bullosa. International Journal of Molecular Sciences, 22, 3326.
[0615] 39. Lee, J. J. A., Maruyama, R., Duddy, W., Sakurai, H. and Yokota, T. (2018) Identification of Novel Antisense-Mediated Exon Skipping Targets in DYSF for Therapeutic Treatment of Dysferlinopathy. Molecular Therapy-Nucleic Acids, 13, 596-604.
[0616] 40. Yamamura, T., Horinouchi, T., Adachi, T., Terakawa, M., Takaoka, Y., Omachi, K., Takasato, M., Takaishi, K., Shoji, T., Onishi, Y. et al. (2020) Development of an exon skipping therapy for X-linked Alport syndrome with truncating variants in COL4A5. Nature Communications, 11.
[0617] 41. Centa, J. L., Stratton, M. P., Pratt, M. A., Osterlund Oltmanns, J. R., Wallace, D. G., Miller, S. A., Weimer, J. M. and Hastings, M. L. (2023) Protracted CLN3 Batten disease in mice that genetically model an exon-skipping therapeutic approach. Mol Ther Nucleic Acids, 33, 15-27.
[0618] 42. Rodriguez-Polo, I. and Behr, R. (2022) Exploring the Potential of Symmetric Exon Deletion to Treat Non-Ischemic Dilated Cardiomyopathy by Removing Frameshift Mutations in TTN. Genes (Basel), 13.
[0619] 43. Liao, W., Dong, J., Peh, H. Y., Tan, L. H., Lim, K. S., Li, L. and Wong, W.F. (2017) Oligonucleotide Therapy for Obstructive and Restrictive Respiratory Diseases. Molecules, 22.
[0620] 44. Zhu, C., Lee, J. Y., Woo, J. Z., Xu, L., Nguyenla, X., Yamashiro, L. H., Ji, F., Biering, S. B., Van Dis, E., Gonzalez, F. et al. (2022) An intranasal ASO therapeutic targeting SARS-COV-2. Nat Commun, 13, 4503.
[0621] 45. Yu, A. M. and Tu, M. J. (2022) Deliver the promise: RNAs as a new class of molecular entities for therapy and vaccination. Pharmacol Ther, 230, 107967.
[0622] 46. Brinks, V., Lipinska, K., de Jager, M., Beumer, W., Button, B., Livraghi-Butrico, A., Henig, N. and Matthee, B. (2019) The Cystic Fibrosis-Like Airway Surface Layer Is not a Significant Barrier for Delivery of Eluforsen to Airway Epithelial Cells. J Aerosol Med Pulm Drug Deliv, 32, 303-316.
[0623] 47. Crosby, J. R., Zhao, C., Jiang, C., Bai, D., Katz, M., Greenlee, S., Kawabe, H., McCaleb, M., Rotin, D., Guo, S. et al. (2017) Inhaled ENaC antisense oligonucleotide ameliorates cystic fibrosis-like lung disease in mice. J Cyst Fibros, 16, 671-680.
[0624] 48. Zhao, C., Crosby, J., Lv, T., Bai, D., Monia, B. P. and Guo, S. (2019) Antisense oligonucleotide targeting of mRNAs encoding ENaC subunits alpha, beta, and gamma improves cystic fibrosis-like disease in mice. J Cyst Fibros, 18, 334-341.
[0625] 49. Ozeri-Galai, E., Friedman, L., Barchad-Avitzur, O., Markovetz, M. R., Boone, W., Rouillard, K. R., Stampfer, C. D., Oren, Y. S., Hill, D. B., Kerem, B. et al. (2023) Delivery Characterization of SPL84 Inhaled Antisense Oligonucleotide Drug for 3849+10 kb C->T Cystic Fibrosis Patients. Nucleic Acid Ther, 33, 306-318.
[0626] 50. Shin, M., Chan, I. L., Cao, Y., Gruntman, A. M., Lee, J., Sousa, J., Rodriguez, T. C., Echeverria, D., Devi, G., Debacker, A. J. et al. (2022) Intratracheally administered LNA gapmer antisense oligonucleotides induce robust gene silencing in mouse lung fibroblasts. Nucleic Acids Res, 50, 8418-8430.
[0627] 51. Luu, K. T., Norris, D. A., Gunawan, R., Henry, S., Geary, R, and Wang, Y. (2017) Population Pharmacokinetics of Nusinersen in the Cerebral Spinal Fluid and Plasma of Pediatric Patients With Spinal Muscular Atrophy Following Intrathecal Administrations. J Clin Pharmacol, 57, 1031-1041.
[0628] 52. Migliorati, J. M., Liu, S., Liu, A., Gogate, A., Nair, S., Bahal, R., Rasmussen, T. P., Manautou, J. E, and Zhong, X. B. (2022) Absorption, Distribution, Metabolism, and Excretion of US Food and Drug Administration-Approved Antisense Oligonucleotide Drugs. Drug Metab Dispos, 50, 888-897.
[0629] 53. Rawlins, E. L. and Hogan, B. L. (2008) Ciliated epithelial cell lifespan in the mouse trachea and lung. Am J Physiol Lung Cell Mol Physiol, 295, L231-234.
[0630] 54. Drevinek, P., Pressler, T., Cipolli, M., De Boeck, K., Schwarz, C., Bouisset, F., Boff, M., Henig, N., Paquette-Lamontagne, N., Montgomery, S. et al. (2020) Antisense oligonucleotide eluforsen is safe and improves respiratory symptoms in F508DEL cystic fibrosis. J Cyst Fibros, 19, 99-107.
[0631] 55. Fajac, I. and De Boeck, K. (2017) New horizons for cystic fibrosis treatment. Pharmacol Ther, 170, 205-211.
[0632] 56. Orenti, A., Pranke, I., Faucon, C., Varilh, J., Hatton, A., Golec, A., Dehillotte, C., Durieu, I., Reix, P., Burgel, P. R. et al. (2023) Nonsense mutations accelerate lung disease and decrease survival of cystic fibrosis children. J Cyst Fibros, 22, 1070-1079.
[0633] 57. Ardizzone, S., Bevivino, G. and Monteleone, G. (2016) Mongersen, an oral Smad7 antisense oligonucleotide, in patients with active Crohn's disease. Therap Adv Gastroenterol, 9, 527-532.
[0634] 58. Quemener, A. M., Centomo, M. L., Sax, S. L. and Panella, R. (2022) Small Drugs, Huge Impact: The Extraordinary Impact of Antisense Oligonucleotides in Research and Drug Development. Molecules, 27.
[0635] 59. Sheng, L., Rigo, F., Bennett, C. F., Krainer, A. R. and Hua, Y. (2020) Comparison of the efficacy of MOE and PMO modifications of systemic antisense oligonucleotides in a severe SMA mouse model. Nucleic Acids Res, 48, 2853-2865.
[0636] 60. Cui, L., Aleksandrov, L., Chang, X. B., Hou, Y. X., He, L., Hegedus, T., Gentzsch, M., Aleksandrov, A., Balch, W. E, and Riordan, J. R. (2007) Domain Interdependence in the Biosynthetic Assembly of CFTR. Journal of Molecular Biology, 365, 981-994.
[0637] 61. Kai, D. and Lukacs, G. L. (2009) Cooperative assembly and misfolding of CFTR domains in vivo. Mol Biol Cell, 20, 1903-1915.
[0638] 62. Haggie, P. M., Phuan, P. W., Tan, J. A., Xu, H., Avramescu, R. G., Perdomo, D., Zlock, L., Nielson, D. W., Finkbeiner, W. E., Lukacs, G. L. et al. (2017) Correctors and potentiators rescue function of the truncated W1282X-Cystic Fibrosis Transmembrane Regulator (CFTR) translation product. Journal of Biological Chemistry, 292, 771-785.
[0639] 63. Ostedgaard, L. S., Randak, C., Rokhlina, T., Karp, P., Vermeer, D., Ashbourne Excoffon, K. J. and Welsh, M. J. (2003) Effects of C-terminal deletions on cystic fibrosis transmembrane conductance regulator function in cystic fibrosis airway epithelia. Proc Natl Acad Sci USA, 100, 1937-1942.
[0640] 64. Stratford, F. L., Ramjeesingh, M., Cheung, J. C., Huan, L. J. and Bear, C. E. (2007) The Walker B motif of the second nucleotide-binding domain (NBD2) of CFTR plays a key role in ATPase activity by the NBD1-NBD2 heterodimer. Biochem J, 401, 581-586.
[0641] 65. Gentzsch, M. and Riordan, J. R. (2001) Localization of sequences within the C-terminal domain of the cystic fibrosis transmembrane conductance regulator which impact maturation and stability. Journal of Biological Chemistry, 276, 1291-1298.
[0642] 66. Gentzsch, M., Aleksandrov, A., Aleksandrov, L, and Riordan, J. R. (2002) Functional analysis of the C-terminal boundary of the second nucleotide binding domain of the cystic fibrosis transmembrane conductance regulator and structural implications. The Biochemical journal, 366, 541-548.
[0643] 67. Sharma, N., LaRusch, J., Sosnay, P. R., Gottschalk, L. B., Lopez, A. P., Pellicore, M. J., Evans, T., Davis, E., Atalar, M., Na, C. H. et al. (2016) A sequence upstream of canonical PDZ-binding motif within CFTR COOH-terminus enhances NHERFI interaction. Am J Physiol Lung Cell Mol Physiol, 311, L1170-L1182.
[0644] 68. Micoud, J., Chauvet, S., Scheckenbach, K. E. L., Alfaidy, N., Chanson, M. and Benharouga, M. (2015) Involvement of the heterodimeric interface region of the nucleotide binding domain-2 (NBD2) in the CFTR quaternary structure and membrane stability. Biochimica et Biophysica Acta-Molecular Cell Research.
[0645] 69. Laselva, O., Qureshi, Z., Zeng, Z. W., Petrotchenko, E. V., Ramjeesingh, M., Hamilton, C. M., Huan, L. J., Borchers, C. H., Pomes, R., Young, R. et al. (2021) Identification of binding sites for ivacaftor on the cystic fibrosis transmembrane conductance regulator. iScience, 24, 102542.
[0646] 70. Fiedorczuk, K. and Chen, J. (2022) Mechanism of CFTR correction by type I folding correctors. Cell, 185, 158-168 e111.
[0647] 71. Martinovich, K. M., Kicic, A., Stick, S. M., Johnsen, R. D., Fletcher, S. and Wilton, S. D. (2022) Investigating the Implications of CFTR Exon Skipping Using a Cftr Exon 9 Deleted Mouse Model. Front Pharmacol, 13, 868863.
[0648] 72. Veit, G., Roldan, A., Hancock, M. A., Da Fonte, D.F., Xu, H., Hussein, M., Frenkiel, S., Matouk, E., Velkov, T. and Lukacs, G. L. (2020) Allosteric folding correction of F508del and rare CFTR mutants by elexacaftor-tezacaftor-ivacaftor (Trikafta) combination. JCI Insight, 5.

[0649] Having described the invention in detail and by reference to specific embodiments thereof, it will be apparent that modifications and variations are possible without departing from the scope of the invention defined in the appended claims. More specifically, although some aspects of the present invention are identified herein as particularly advantageous, it is contemplated that the present invention is not necessarily limited to these particular aspects of the invention.

What is claimed is:

1. A composition comprising one or more modified oligonucleotides, wherein each of the one or more modified oligonucleotides consists of 8 to 30 linked nucleosides, wherein the nucleobase sequence of each of the one or more modified oligonucleotides is at least 80% complementary to an equal-length portion of a target region of a cystic fibrosis transmembrane conductance regulator (CFTR) transcript, wherein the target region is within:
(a) nucleobase 198,888 and nucleobase 199,094 of SEQ ID NO: 130;
(b) nucleobase 199,705 and nucleobase 199,796 of SEQ ID NO: 130.

2. The composition of claim 1, wherein:
(a) the nucleobase sequence of each of the one or more modified oligonucleotides is at least 80% complementary to an equal-length portion within nucleobase 198,888 and nucleobase 199,094 of SEQ ID NO: 130; or
(b) the nucleobase sequence of each of the one or more modified oligonucleotides is at least 80% complementary to an equal-length portion within nucleobase 199,705 and nucleobase 199,796 of SEQ ID NO: 130.

3. The composition of claim 1, wherein:
(a) the target region is within nucleobase 198,888 and nucleobase 199,094 of SEQ ID NO: 130, and each of the one or more modified oligonucleotides is selected from the group consisting of SEQ ID NOs: 174-177; or
(b) the target region is within nucleobase 199,705 and nucleobase 199,796 of SEQ ID NO: 130, and each of the one or more modified oligonucleotides is selected from the group consisting of SEQ ID NOs: 178-181.

4. The composition of claim 1, wherein the composition comprises a modified oligonucleotide selected from SEQ ID NO: 174-177, and a modified oligonucleotide selected from SEQ ID NO: 178-181.

5. The composition of claim 1, wherein the nucleobase sequence of each of the one or more modified oligonucleotides is at least 85%, at least 90%, at least 95%, at least 96%, at least 97%, at least 98%, at least 99%, or at least 100% complementary to an equal-length portion of the target region.

6. The composition of claim 1, wherein each of the one or more modified oligonucleotides comprises at least one modified nucleoside selected from a modified sugar moiety, a 2′-substituted sugar moiety, a 2′OME, a 2′F, a 2′-MOE, a bicyclic sugar moiety, a LNA, a cEt, a sugar surrogate, a morpholino, or a modified morpholino.

7. The compound of claim 1, wherein each of the one or more modified oligonucleotides comprises at least 5, at least 10, at least 15, at least 20 or at least 25 modified nucleosides, each independently comprising a modified sugar moiety.

8. The composition of claim 1, wherein each nucleoside of each of the one or more modified oligonucleotides is a modified nucleoside, each independently comprising a modified sugar moiety.

9. The composition of claim 1, wherein each of the one or more modified oligonucleotides comprises at least two modified nucleosides comprising modified sugar moieties that are the same as one another or that are different from one another.

10. The composition of claim 1, wherein each of the one or more modified oligonucleotides comprises a modified region of at least 5, at least 10, at least 15, at least 16, at least 17, at least 18, at least 19, or at least 20 contiguous modified nucleosides.

11. The composition of claim 10, wherein each modified nucleoside of the modified region has a modified sugar moiety independently selected from: 2′-F, 2′-OMe, 2′-MOE, cEt, LNA, morpholino, and modified morpholino.

12. The composition of claim 10, wherein the modified nucleosides of the modified region each comprise the same modification as one another.

13. The composition of claim 10, wherein the modified nucleosides of the modified region each comprise the same 2′-substituted sugar moiety selected from: 2′-F, 2′-OMe, and 2′-MOE.

14. The composition of claim 10, wherein the modified nucleosides of the modified region each comprise the same bicyclic sugar moiety selected from: LNA and cEt.

15. The composition of claim 10, wherein the modified nucleosides of the modified region each comprises a sugar surrogate, and wherein the sugar surrogate of the modified nucleosides of the region of modified nucleosides is a morpholino.

16. The composition of claim 1, wherein each of the one or more modified oligonucleotides comprises at least one modified internucleoside linkage.

17. The composition of claim 16, wherein the at least one modified internucleoside linkage comprises at least one phosphorothioate internucleoside linkage.

18. The composition of claim 16, wherein each internucleoside linkage is a modified internucleoside linkage and wherein each internucleoside linkage comprises the same modification.

19. The composition of claim 16, wherein each internucleoside linkage is a phosphorothioate internucleoside linkage.

20. The composition of claim 1, comprising at least one conjugate.

21. The composition of claim 1, wherein the composition modulates splicing or expression of the CFTR transcript.

22. The composition of claim 1, further comprising one or more Cystic fibrosis transmembrane conductance regulator (CFTR) modulators.

23. The composition of claim 22, wherein the one or more CFTR modulators are selected from ivacaftor (VX-770), lumacaftor (VX-809), tezacaftor (VX-661), elexacaftor (VX-445), bamocaftor (VX-659), olacaftor (VX-440), vanzacaftor (VX-121), deutivacaftor (VX-561) (formerly CTP-656), VX-152, ABBV-2222 (galicaftor, formerly GLPG2222), ABBV-3221, ABBV-3067, ABBV-191, ABBV-974 (formerly GLPG-1837), ABBV-2451 (formerly GLPG-2451), ABBV-3067 (formerly GLPG3067), ELX-02 (NB124), FDL169, cavonstat (N91115), MRT5005, ataluren (PTC124), posencaftor (PTI-801), nesolicaftor (PTI-428), sodium 4-phenylbutarate (4PBA), SION-638, SION-109, SION-451, SION-719, VRT-532, N6022, or combinations thereof.

24. A pharmaceutical composition comprising at least one composition according to claim 1 and a pharmaceutically acceptable carrier or diluent.

25. A method of modulating splicing or expression of a CFTR transcript in a cell comprising contacting the cell with at least one composition according to claim 1.

26. The method of claim 25, wherein the cell is in vitro or in vivo.

27. A method of treating cystic fibrosis, comprising administering at least one composition according to claim 1 to an animal in need thereof.

28. The method of claim 27, wherein the administering step comprises delivering to the animal by inhalation, parenteral injection or infusion, oral, subcutaneous or intramuscular injection, buccal, transdermal, transmucosal, and topical.

29. The method of claim 27, wherein the animal is a human or a mouse.

30. The method of claim 27, further comprising administering one or more Cystic fibrosis transmembrane conductance regulator (CFTR) modulators.

31. The method of claim 30, wherein the one or more CFTR modulators are selected from ivacaftor (VX-770), lumacaftor (VX-809), tezacaftor (VX-661), elexacaftor (VX-445), bamocaftor (VX-659), olacaftor (VX-440), vanzacaftor (VX-121), deutivacaftor (VX-561) (formerly CTP-656), VX-152, ABBV-2222 (galicaftor, formerly GLPG2222), ABBV-3221, ABBV-3067, ABBV-191, ABBV-974 (formerly GLPG-1837), ABBV-2451 (formerly GLPG-2451), ABBV-3067 (formerly GLPG3067), ELX-02 (NB124), FDL169, cavonstat (N91115), MRT5005, ataluren (PTC124), posencaftor (PTI-801), nesolicaftor (PTI-428), sodium 4-phenylbutarate (4PBA), SION-638, SION-109, SION-451, SION-719, VRT-532, N6022, or combinations thereof.

32. A method of treating cystic fibrosis, comprising administering the pharmaceutical composition of claim 24 to an animal in need thereof.

33. The method of claim 32, further comprising administering one or more Cystic fibrosis transmembrane conductance regulator (CFTR) modulators.

34. The method of claim 33, wherein the one or more CFTR modulators are selected from ivacaftor (VX-770), lumacaftor (VX-809), tezacaftor (VX-661), elexacaftor (VX-445), bamocaftor (VX-659), olacaftor (VX-440), vanzacaftor (VX-121), deutivacaftor (VX-561) (formerly CTP-656), VX-152, ABBV-2222 (galicaftor, formerly GLPG2222), ABBV-3221, ABBV-3067, ABBV-191, ABBV-974 (formerly GLPG-1837), ABBV-2451 (formerly GLPG-2451), ABBV-3067 (formerly GLPG3067), ELX-02 (NB124), FDL169, cavonstat (N91115), MRT5005, ataluren (PTC124), posencaftor (PTI-801), nesolicaftor (PTI-428), sodium 4-phenylbutarate (4PBA), SION-638, SION-109, SION-451, SION-719, VRT-532, N6022, or combinations thereof.

The application's sequence listing, which the Patent Office published only in electronic form, follows.

SEQUENCE LISTING (254 sequences)

SEQ ID NO: 1 - DNA, 25 bp, synthetic construct
  misc_feature 1..25: note = Synthetic oligonucleotide
  source 1..25: mol_type = other DNA
ggtccagctaaaagagaagagggca

SEQ ID NO: 2 - DNA, 25 bp, synthetic construct
  misc_feature 1..25: note = Synthetic oligonucleotide
  source 1..25: mol_type = other DNA
ctttcctcaaaattggtgtggtcca

SEQ ID NO: 3 - DNA, 25 bp, synthetic construct
  misc_feature 1..25: note = Synthetic oligonucleotide
  source 1..25: mol_type = other DNA
tatgtctgacaactccaagtggtgt

SEQ ID NO: 4 - DNA, 25 bp, synthetic construct
  misc_feature 1..25: note = Synthetic oligonucleotide
  source 1..25: mol_type = other DNA
ctagtttttcagacaagtggtcagc

SEQ ID NO: 5 - DNA, 25 bp, synthetic construct
  misc_feature 1..25: note = Synthetic oligonucleotide
  source 1..25: mol_type = other DNA
ttcctagcaagacaggctggacagc

SEQ ID NO: 6 - DNA, 25 bp, synthetic construct
  misc_feature 1..25: note = Synthetic oligonucleotide
  source 1..25: mol_type = other DNA
ataggatgctatgattcttcctagc

SEQ ID NO: 7 - DNA, 25 bp, synthetic construct
  misc_feature 1..25: note = Synthetic oligonucleotide
  source 1..25: mol_type = other DNA
ataagcctatgccaaggtaaatggc

SEQ ID NO: 8 - DNA, 25 bp, synthetic construct
  misc_feature 1..25: note = Synthetic oligonucleotide
  source 1..25: mol_type = other DNA
tgtcctgacaatgaagagaaggcat

SEQ ID NO: 9 - DNA, 25 bp, synthetic construct
  misc_feature 1..25: note = Synthetic oligonucleotide
  source 1..25: mol_type = other DNA
aatgcgatgaaggccaaaaatagct

SEQ ID NO: 10 - DNA, 25 bp, synthetic construct
  misc_feature 1..25: note = Synthetic oligonucleotide
  source 1..25: mol_type = other DNA
tagctgttctcatctgcattccaat

SEQ ID NO: 11 - DNA, 25 bp, synthetic construct
  misc_feature 1..25: note = Synthetic oligonucleotide
  source 1..25: mol_type = other DNA
catcttccaaaaagtattaccttct

SEQ ID NO: 12 - DNA, 25 bp, synthetic construct
  misc_feature 1..25: note = Synthetic oligonucleotide
  source 1..25: mol_type = other DNA
ttgttcaggttgttggaaagaagac

SEQ ID NO: 13 - DNA, 25 bp, synthetic construct
  misc_feature 1..25: note = Synthetic oligonucleotide
  source 1..25: mol_type = other DNA
atcaagaacgcggcttgacaacttt

SEQ ID NO: 14 - DNA, 25 bp, synthetic construct
  misc_feature 1..25: note = Synthetic oligonucleotide
  source 1..25: mol_type = other DNA
cacgagtctttcattgatctttgca

SEQ ID NO: 15 - DNA, 25 bp, synthetic construct
  misc_feature 1..25: note = Synthetic oligonucleotide
  source 1..25: mol_type = other DNA
ctgattcccaacaatatgccttaac

SEQ ID NO: 16 - DNA, 25 bp, synthetic construct
  misc_feature 1..25: note = Synthetic oligonucleotide
  source 1..25: mol_type = other DNA
caatcattttctccatcgctgattc

SEQ ID NO: 17 - DNA, 25 bp, synthetic construct
  misc_feature 1..25: note = Synthetic oligonucleotide
  source 1..25: mol_type = other DNA
attatgtcaacttactctctcaagt

SEQ ID NO: 18 - DNA, 25 bp, synthetic construct
  misc_feature 1..25: note = Synthetic oligonucleotide
  source 1..25: mol_type = other DNA
gcctgtggtcattaagttatactcc

SEQ ID NO: 19 - DNA, 25 bp, synthetic construct
  misc_feature 1..25: note = Synthetic oligonucleotide
  source 1..25: mol_type = other DNA
ctcctcccaaaatgctgttacattt

SEQ ID NO: 20 - DNA, 25 bp, synthetic construct
  misc_feature 1..25: note = Synthetic oligonucleotide
  source 1..25: mol_type = other DNA
tatttagaaatctcacctcctccca

SEQ ID NO: 21 - DNA, 25 bp, synthetic construct
  misc_feature 1..25: note = Synthetic oligonucleotide
  source 1..25: mol_type = other DNA
ctttctccagtaattccccaaatcc

SEQ ID NO: 22 - DNA, 25 bp, synthetic construct
  misc_feature 1..25: note = Synthetic oligonucleotide
  source 1..25: mol_type = other DNA
gtcaccattgctttgttgtactttc

SEQ ID NO: 23 - DNA, 25 bp, synthetic construct
  misc_feature 1..25: note = Synthetic oligonucleotide
  source 1..25: mol_type = other DNA
ctgaaactgacattgttctcatcac

SEQ ID NO: 24 - DNA, 25 bp, synthetic construct
  misc_feature 1..25: note = Synthetic oligonucleotide
  source 1..25: mol_type = other DNA
aggatttcccacaaggcagagatga

SEQ ID NO: 25 - DNA, 25 bp, synthetic construct
  misc_feature 1..25: note = Synthetic oligonucleotide
  source 1..25: mol_type = other DNA
atagccaacatctctcctttctcta

SEQ ID NO: 26 - DNA, 25 bp, synthetic construct
  misc_feature 1..25: note = Synthetic oligonucleotide
  source 1..25: mol_type = other DNA
ctttcctgatccagtagatccagta

SEQ ID NO: 27 - DNA, 25 bp, synthetic construct
  misc_feature 1..25: note = Synthetic oligonucleotide
  source 1..25: mol_type = other DNA
ctttcctgatccagtagatccagta

SEQ ID NO: 28 - DNA, 25 bp, synthetic construct
  misc_feature 1..25: note = Synthetic oligonucleotide
  source 1..25: mol_type = other DNA
tccagttctcccaaaatcaacatca

SEQ ID NO: 29 - DNA, 25 bp, synthetic construct
  misc_feature 1..25: note = Synthetic oligonucleotide
  source 1..25: mol_type = other DNA
tgtgcttaataattccctctgaagc

SEQ ID NO: 30 - DNA, 25 bp, synthetic construct
  misc_feature 1..25: note = Synthetic oligonucleotide
  source 1..25: mol_type = other DNA
attgagagcagaatgaaactcttcc

SEQ ID NO: 31 - DNA, 25 bp, synthetic construct
  misc_feature 1..25: note = Synthetic oligonucleotide
  source 1..25: mol_type = other DNA
gatattttctttgatagtacccggc

SEQ ID NO: 32 - DNA, 25 bp, synthetic construct
  misc_feature 1..25: note = Synthetic oligonucleotide
  source 1..25: mol_type = other DNA
acactcttatatctgtactcatcat

SEQ ID NO: 33 - DNA, 25 bp, synthetic construct
  misc_feature 1..25: note = Synthetic oligonucleotide
  source 1..25: mol_type = other DNA
ctgctgtagttggcaagctttgaca

SEQ ID NO: 34 - DNA, 25 bp, synthetic construct
  misc_feature 1..25: note = Synthetic oligonucleotide
  source 1..25: mol_type = other DNA
cataaatatgcttacctgctgtagt

SEQ ID NO: 35 - DNA, 25 bp, synthetic construct
  misc_feature 1..25: note = Synthetic oligonucleotide
  source 1..25: mol_type = other DNA
gggaatctaataggtacaaatcagc

SEQ ID NO: 36 - DNA, 25 bp, synthetic construct
  misc_feature 1..25: note = Synthetic oligonucleotide
  source 1..25: mol_type = other DNA
caaatcagcatctttatatactgct

SEQ ID NO: 37 - DNA, 25 bp, synthetic construct
  misc_feature 1..25: note = Synthetic oligonucleotide
  source 1..25: mol_type = other DNA
actcagtcatagaacatacctttca

SEQ ID NO: 38 - DNA, 25 bp, synthetic construct
  misc_feature 1..25: note = Synthetic oligonucleotide
  source 1..25: mol_type = other DNA
aacaaacatacttacctcaaccaga

SEQ ID NO: 39 - DNA, 25 bp, synthetic construct
  misc_feature 1..25: note = Synthetic oligonucleotide
  source 1..25: mol_type = other DNA
cctgcctgtaaatcatcccatagga

SEQ ID NO: 40 - DNA, 25 bp, synthetic construct
  misc_feature 1..25: note = Synthetic oligonucleotide
  source 1..25: mol_type = other DNA
caaggtgggtgaaaattggactcct

SEQ ID NO: 41 - DNA, 25 bp, synthetic construct
  misc_feature 1..25: note = Synthetic oligonucleotide
  source 1..25: mol_type = other DNA
cgaagtgtccagagtccttttaagc

SEQ ID NO: 42 - DNA, 25 bp, synthetic construct
  misc_feature 1..25: note = Synthetic oligonucleotide
  source 1..25: mol_type = other DNA
cagagtttcaaagtaagtctggcgt

SEQ ID NO: 43 - DNA, 25 bp, synthetic construct
  misc_feature 1..25: note = Synthetic oligonucleotide
  source 1..25: mol_type = other DNA
ttggcagtgtgcaaattcagagctt

SEQ ID NO: 44 - DNA, 25 bp, synthetic construct
  misc_feature 1..25: note = Synthetic oligonucleotide
  source 1..25: mol_type = other DNA
ctattctcatttggaaccagcgcaa

SEQ ID NO: 45 - DNA, 25 bp, synthetic construct
  misc_feature 1..25: note = Synthetic oligonucleotide
  source 1..25: mol_type = other DNA
agaggacaaatatcatgtctattct

SEQ ID NO: 46 - DNA, 25 bp, synthetic construct
  misc_feature 1..25: note = Synthetic oligonucleotide
  source 1..25: mol_type = other DNA
atggagatgaaggtaacaacaatga

SEQ ID NO: 47 - DNA, 25 bp, synthetic construct
  misc_feature 1..25: note = Synthetic oligonucleotide
  source 1..25: mol_type = other DNA
aacttaaacactctgctcacagatc

SEQ ID NO: 48 - DNA, 25 bp, synthetic construct
  misc_feature 1..25: note = Synthetic oligonucleotide
  source 1..25: mol_type = other DNA
ctaaaacgtcagatgatccttctct

SEQ ID NO: 49 - DNA, 25 bp, synthetic construct
  misc_feature 1..25: note = Synthetic oligonucleotide
  source 1..25: mol_type = other DNA
tatcacttttcttcacatgctcatt

SEQ ID NO: 50 - DNA, 25 bp, synthetic construct
  misc_feature 1..25: note = Synthetic oligonucleotide
  source 1..25: mol_type = other DNA
accatttcgcctccagagggccaga

SEQ ID NO: 51 - DNA, 25 bp, synthetic construct
  misc_feature 1..25: note = Synthetic oligonucleotide
  source 1..25: mol_type = other DNA
catccatgtatttcacagtaaggtc

SEQ ID NO: 52 - DNA, 25 bp, synthetic construct
  misc_feature 1..25: note = Synthetic oligonucleotide
  source 1..25: mol_type = other DNA
atgttctctaatacggcatttccat

SEQ ID NO: 53 - DNA, 25 bp, synthetic construct
  misc_feature 1..25: note = Synthetic oligonucleotide
  source 1..25: mol_type = other DNA
cctctgtccaggacttattgaaaaa

SEQ ID NO: 54 - DNA, 25 bp, synthetic construct
  misc_feature 1..25: note = Synthetic oligonucleotide
  source 1..25: mol_type = other DNA
gtaatgctgaaatctcaccctctgt

SEQ ID NO: 55 - DNA, 25 bp, synthetic construct
  misc_feature 1..25: note = Synthetic oligonucleotide
  source 1..25: mol_type = other DNA
aattccatgagacaccatcaatctc

SEQ ID NO: 56 - DNA, 25 bp, synthetic construct
  misc_feature 1..25: note = Synthetic oligonucleotide
  source 1..25: mol_type = other DNA
gtactttttcctgatccagttcttc

SEQ ID NO: 57 - DNA, 25 bp, synthetic construct
  misc_feature 1..25: note = Synthetic oligonucleotide
  source 1..25: mol_type = other DNA
catttttgtgctcacctgtgttatc

SEQ ID NO: 58 - DNA, 25 bp, synthetic construct
  misc_feature 1..25: note = Synthetic oligonucleotide
  source 1..25: mol_type = other DNA
catctttccattttccattgggatc

SEQ ID NO: 59 - DNA, 25 bp, synthetic construct
  misc_feature 1..25: note = Synthetic oligonucleotide
  source 1..25: mol_type = other DNA
ctcatctgcaactttccatatttct

SEQ ID NO: 60 - DNA, 25 bp, synthetic construct
  misc_feature 1..25: note = Synthetic oligonucleotide
  source 1..25: mol_type = other DNA
tatttgtcatccttacctcatctgc

SEQ ID NO: 61 - DNA, 25 bp, synthetic construct
  misc_feature 1..25: note = Synthetic oligonucleotide
  source 1..25: mol_type = other DNA
atcctttcctcaaaattggtctggt

SEQ ID NO: 62 - DNA, 25 bp, synthetic construct
  misc_feature 1..25: note = Synthetic oligonucleotide
  source 1..25: mol_type = other DNA
gtatatgtctgacaattccaggcgc

SEQ ID NO: 63 - DNA, 25 bp, synthetic construct
  misc_feature 1..25: note = Synthetic oligonucleotide
  source 1..25: mol_type = other DNA
cagatagattgtcagcagaatcaac

SEQ ID NO: 64 - DNA, 25 bp, synthetic construct
  misc_feature 1..25: note = Synthetic oligonucleotide
  source 1..25: mol_type = other DNA
gtacatgaacatacctttccaattt

SEQ ID NO: 65 - DNA, 25 bp, synthetic construct
  misc_feature 1..25: note = Synthetic oligonucleotide
  source 1..25: mol_type = other DNA
gaggctgtactgctttggtgacttc

SEQ ID NO: 66 - DNA, 25 bp, synthetic construct
  misc_feature 1..25: note = Synthetic oligonucleotide
  source 1..25: mol_type = other DNA
gaagctatgattcttcccagtaaga

SEQ ID NO: 67 - DNA, 25 bp, synthetic construct
  misc_feature 1..25: note = Synthetic oligonucleotide
  source 1..25: mol_type = other DNA
gtgtaggagcagtgtcctcacaata

SEQ ID NO: 68 - DNA, 25 bp, synthetic construct
  misc_feature 1..25: note = Synthetic oligonucleotide
  source 1..25: mol_type = other DNA
aatgtgatgaaggccaaaaatggct

SEQ ID NO: 69 - DNA, 25 bp, synthetic construct
  misc_feature 1..25: note = Synthetic oligonucleotide
  source 1..25: mol_type = other DNA
gctattctcatctgcattccaatgt

SEQ ID NO: 70 - DNA, 25 bp, synthetic construct
  misc_feature 1..25: note = Synthetic oligonucleotide
  source 1..25: mol_type = other DNA
cctgtgcaaggaagtattaccttct

SEQ ID NO: 71 - DNA, 25 bp, synthetic construct
  misc_feature 1..25: note = Synthetic oligonucleotide
  source 1..25: mol_type = other DNA
ctagaacacggcttgacagctttaa

SEQ ID NO: 72 - DNA, 25 bp, synthetic construct
  misc_feature 1..25: note = Synthetic oligonucleotide
  source 1..25: mol_type = other DNA
tggaaaggagactaacaagttgtcc

SEQ ID NO: 73 - DNA, 25 bp, synthetic construct
  misc_feature 1..25: note = Synthetic oligonucleotide
  source 1..25: mol_type = other DNA
actgatcttcccagctctctgatct

SEQ ID NO: 74 - DNA, 25 bp, synthetic construct
  misc_feature 1..25: note = Synthetic oligonucleotide
  source 1..25: mol_type = other DNA
atttctgaggtaatcacaagtcttt

SEQ ID NO: 75 - DNA, 25 bp, synthetic construct
  misc_feature 1..25: note = Synthetic oligonucleotide
  source 1..25: mol_type = other DNA
agtatgccttaacagattggatatt

SEQ ID NO: 76 - DNA, 25 bp, synthetic construct
  misc_feature 1..25: note = Synthetic oligonucleotide
  source 1..25: mol_type = other DNA
attttttccattgcttcttcccagc

SEQ ID NO: 77 - DNA, 25 bp, synthetic construct
  misc_feature 1..25: note = Synthetic oligonucleotide
  source 1..25: mol_type = other DNA
attggaacaacttactgtcttaagt

SEQ ID NO: 78 - DNA, 25 bp, synthetic construct
  misc_feature 1..25: note = Synthetic oligonucleotide
  source 1..25: mol_type = other DNA
tccatcactacttctgtagtcgtta

SEQ ID NO: 79 - DNA, 25 bp, synthetic construct
  misc_feature 1..25: note = Synthetic oligonucleotide
  source 1..25: mol_type = other DNA
ctcctcccagaaggctgttacattc

SEQ ID NO: 80 - DNA, 25 bp, synthetic construct
  misc_feature 1..25: note = Synthetic oligonucleotide
  source 1..25: mol_type = other DNA
ttaaaaattctgacctcctcccaga

SEQ ID NO: 81 - DNA, 25 bp, synthetic construct
  misc_feature 1..25: note = Synthetic oligonucleotide
  source 1..25: mol_type = other DNA
ggctgtcatcaccattagaagtttt

SEQ ID NO: 82 - DNA, 25 bp, synthetic construct
  misc_feature 1..25: note = Synthetic oligonucleotide
  source 1..25: mol_type = other DNA
aattactgaagaagaggctgtcatc

SEQ ID NO: 83 - DNA, 25 bp, synthetic construct
  misc_feature 1..25: note = Synthetic oligonucleotide
  source 1..25: mol_type = other DNA
taatatctttcaggacaggagtacc

SEQ ID NO: 84 - DNA, 25 bp, synthetic construct
  misc_feature 1..25: note = Synthetic oligonucleotide
  source 1..25: mol_type = other DNA
gatccagcaaccgccaacaactgtc

SEQ ID NO: 85 - DNA, 25 bp, synthetic construct
  misc_feature 1..25: note = Synthetic oligonucleotide
  source 1..25: mol_type = other DNA
agaacaaaagaactaccttgcctgc

SEQ ID NO: 86 - DNA, 25 bp, synthetic construct
  misc_feature 1..25: note = Synthetic oligonucleotide
  source 1..25: mol_type = other DNA
ctcccataatcaccattagaagtga

SEQ ID NO: 87 - DNA, 25 bp, synthetic construct
  misc_feature 1..25: note = Synthetic oligonucleotide
  source 1..25: mol_type = other DNA
attttaccctctgaaggctccagtt

SEQ ID NO: 88 - DNA, 25 bp, synthetic construct
  misc_feature 1..25: note = Synthetic oligonucleotide
  source 1..25: mol_type = other DNA
acagaatgaaattcttccactgtgc

SEQ ID NO: 89 - DNA, 25 bp, synthetic construct
  misc_feature 1..25: note = Synthetic oligonucleotide
  source 1..25: mol_type = other DNA
gtgccaggcataatccaggaaaact

SEQ ID NO: 90 - DNA, 25 bp, synthetic construct
  misc_feature 1..25: note = Synthetic oligonucleotide
  source 1..25: mol_type = other DNA
atgctttgatgacgcttctgtatct

SEQ ID NO: 91 - DNA, 25 bp, synthetic construct
  misc_feature 1..25: note = Synthetic oligonucleotide
  source 1..25: mol_type = other DNA
ttttcacatagtttcttacctcttc

SEQ ID NO: 92 - DNA, 25 bp, synthetic construct
  misc_feature 1..25: note = Synthetic oligonucleotide
  source 1..25: mol_type = other DNA
tctaggtatccaaaaggagagtcta

SEQ ID NO: 93 - DNA, 25 bp, synthetic construct
  misc_feature 1..25: note = Synthetic oligonucleotide
  source 1..25: mol_type = other DNA
ggtattcaaagaacatacctttcaa

SEQ ID NO: 94 - DNA, 25 bp, synthetic construct
  misc_feature 1..25: note = Synthetic oligonucleotide
  source 1..25: mol_type = other DNA
acaatagaacattcttacctctgcc

SEQ ID NO: 95 - DNA, 25 bp, synthetic construct
  misc_feature 1..25: note = Synthetic oligonucleotide
  source 1..25: mol_type = other DNA
tcgttatttggcagccaaagttact

SEQ ID NO: 96 - DNA, 25 bp, synthetic construct
  misc_feature 1..25: note = Synthetic oligonucleotide
  source 1..25: mol_type = other DNA
gagccacagcacaaccaaagaagca

SEQ ID NO: 97 - DNA, 18 bp, synthetic construct
  misc_feature 1..18: note = Synthetic oligonucleotide
  source 1..18: mol_type = other DNA
tccaaggagccacagcac

SEQ ID NO: 98 - DNA, 18 bp, synthetic construct
  misc_feature 1..18: note = Synthetic oligonucleotide
  source 1..18: mol_type = other DNA
ttccaaggagccacagca

SEQ ID NO: 99 - DNA, 25 bp, synthetic construct
  misc_feature 1..25: note = Synthetic oligonucleotide
  source 1..25: mol_type = other DNA
ttccaaggagccacagcacaaccaa

SEQ ID NO: 100 - DNA, 25 bp, synthetic construct
  misc_feature 1..25: note = Synthetic oligonucleotide
  source 1..25: mol_type = other DNA
aacagaaataaaacacaatctacac

SEQ ID NO: 101 - DNA, 25 bp, synthetic construct
  misc_feature 1..25: note = Synthetic oligonucleotide
  source 1..25: mol_type = other DNA
tttccaaggagccacagcacaacca

SEQ ID NO: 102 - DNA, 25 bp, synthetic construct
  misc_feature 1..25: note = Synthetic oligonucleotide
  source 1..25: mol_type = other DNA
acaatctacacaataggacatggaa

SEQ ID NO: 103 - DNA, 25 bp, synthetic construct
  misc_feature 1..25: note = Synthetic oligonucleotide
  source 1..25: mol_type = other DNA
cacaatctacacaataggacatgga

SEQ ID NO: 104 - DNA, 25 bp, synthetic construct
  misc_feature 1..25: note = Synthetic oligonucleotide
  source 1..25: mol_type = other DNA
acacaatctacacaataggacatgg

SEQ ID NO: 105 - DNA, 25 bp, synthetic construct
  misc_feature 1..25: note = Synthetic oligonucleotide
  source 1..25: mol_type = other DNA
gactttttttctaacatcttcacct

SEQ ID NO: 106 - DNA, 25 bp, synthetic construct
  misc_feature 1..25: note = Synthetic oligonucleotide
  source 1..25: mol_type = other DNA
atggaacaacacacagttgattttt

SEQ ID NO: 107 - DNA, 25 bp, synthetic construct
  misc_feature 1..25: note = Synthetic oligonucleotide
  source 1..25: mol_type = other DNA
atcgaacaagacacagttgattttt

SEQ ID NO: 108 - DNA, 25 bp, synthetic construct
  misc_feature 1..25: note = Synthetic oligonucleotide
  source 1..25: mol_type = other DNA
gagtggaacaagacacagttgattt

SEQ ID NO: 109 - DNA, 25 bp, synthetic construct
  misc_feature 1..25: note = Synthetic oligonucleotide
  source 1..25: mol_type = other DNA
cacaatctacacaataagacatgga

SEQ ID NO: 110 - DNA, 25 bp, synthetic construct
  misc_feature 1..25: note = Synthetic oligonucleotide
  source 1..25: mol_type = other DNA
caagatgagtgaaaattggactcct

SEQ ID NO: 111 - DNA, 25 bp, synthetic construct
  misc_feature 1..25: note = Synthetic oligonucleotide
  source 1..25: mol_type = other DNA
cgaaggcacgaagtgtccatagtcc

SEQ ID NO: 112 - DNA, 25 bp, synthetic construct
  misc_feature 1..25: note = Synthetic oligonucleotide
  source 1..25: mol_type = other DNA
aacagagtttcaaagtaaggctgcc

SEQ ID NO: 113 - DNA, 25 bp, synthetic construct
  misc_feature 1..25: note = Synthetic oligonucleotide
  source 1..25: mol_type = other DNA
agttggcagtatgtaaattcagagc

SEQ ID NO: 114 - DNA, 25 bp, synthetic construct
  misc_feature 1..25: note = Synthetic oligonucleotide
  source 1..25: mol_type = other DNA
ttctattctcatttggaaccagcgc

SEQ ID NO: 115 - DNA, 25 bp, synthetic construct
  misc_feature 1..25: note = Synthetic oligonucleotide
  source 1..25: mol_type = other DNA
ggtaacagcaatgaagaagatgaca

SEQ ID NO: 116 - DNA, 25 bp, synthetic construct
  misc_feature 1..25: note = Synthetic oligonucleotide
  source 1..25: mol_type = other DNA
atgtcaatgaacttaaagactcggc

SEQ ID NO: 117 - DNA, 25 bp, synthetic construct
  misc_feature 1..25: note = Synthetic oligonucleotide
  source 1..25: mol_type = other DNA
ggccagatgtcatctttcttcacgt

SEQ ID NO: 118 - DNA, 25 bp, synthetic construct
  misc_feature 1..25: note = Synthetic oligonucleotide
  source 1..25: mol_type = other DNA
atctttgacagtcatttggccccct

SEQ ID NO: 119 - DNA, 25 bp, synthetic construct
  misc_feature 1..25: note = Synthetic oligonucleotide
  source 1..25: mol_type = other DNA
ccaccttctgtgtattttgctgtga

SEQ ID NO: 120 - DNA, 25 bp, synthetic construct
  misc_feature 1..25: note = Synthetic oligonucleotide
  source 1..25: mol_type = other DNA
tctctaatatggcatttccaccttc

SEQ ID NO: 121 - DNA, 25 bp, synthetic construct
  misc_feature 1..25: note = Synthetic oligonucleotide
  source 1..25: mol_type = other DNA
ccaggacttattgagaaggaaatgt

SEQ ID NO: 122 - DNA, 25 bp, synthetic construct
  misc_feature 1..25: note = Synthetic oligonucleotide
  source 1..25: mol_type = other DNA
aagcagtgttcaaatctcaccctct

SEQ ID NO: 123 - DNA, 25 bp, synthetic construct
  misc_feature 1..25: note = Synthetic oligonucleotide
  source 1..25: mol_type = other DNA
atccagttcttcccaagaggcccac

SEQ ID NO: 124 - DNA, 25 bp, synthetic construct
  misc_feature 1..25: note = Synthetic oligonucleotide
  source 1..25: mol_type = other DNA
agctgataacaaagtactcttccct

SEQ ID NO: 125 - DNA, 25 bp, synthetic construct
  misc_feature 1..25: note = Synthetic oligonucleotide
  source 1..25: mol_type = other DNA
aagttattgaatcccaagacacacc

SEQ ID NO: 126 - DNA, 25 bp, synthetic construct
  misc_feature 1..25: note = Synthetic oligonucleotide
  source 1..25: mol_type = other DNA
ctaagtccttttgctcacctgtggt

SEQ ID NO: 127 - DNA, 25 bp, synthetic construct
  misc_feature 1..25: note = Synthetic oligonucleotide
  source 1..25: mol_type = other DNA
gatcactccactgttcatagggatc

SEQ ID NO: 128 - DNA, 25 bp, synthetic construct
  misc_feature 1..25: note = Synthetic oligonucleotide
  source 1..25: mol_type = other DNA
ctcatctgcaactttccatatttct

SEQ ID NO: 129 - DNA, 25 bp, synthetic construct
  misc_feature 1..25: note = Synthetic oligonucleotide
  source 1..25: mol_type = other DNA
atttcagttagcagccttacctcat

SEQ ID NO: 130 - DNA, 250188 bp, Homo sapiens
  source 1..250188: mol_type = genomic DNA
tgaatgagaggtgccccatcaactggacttctcctgagtgttgaaaaggtaagagggttttgcttctttattcactcctttcttactatttgcattgtaatataactctcttgggactcaagggaacaaaccatacagtgtcttttgctaaatgccaaaaatcaagaagccagttgaagttttcagttcaaattatttcacaagtgttacacagtagaaaacctttatggtggctcacgcctgtaatcccaacactttgggaggccgaggtgggtggatcatgaggtcaggagtttaagaccagcctggccaagatggtgaaaccccgtctctacaaaaaatacaaaaattagccaggcgtggtggcgggcacctgtaatctcaactactggggaggctgaagtagggaattgcttgaacctaggaggcagagattgcagcgacctgagatcgcgccactgcactctagcctgggcgacagaccgagactccatctccaaaaaaaaaaaaaaagaaaagaaaagaaaagaaaaagaaaaaaaaaagaaaaacaacaacaaaaaaaaaccaaaacaaaaaacctttttttttttttgtctcagtttgaggtctcttgttacaaatttaaagaaaattaattttacaatttcctattctcaatgattttgatttactgatattttaccctacaacaatatagtgaaaaagtgtggtcatgggattggttagacctaattcaggactaccaatactagatgtgaggctataggcaggtgtgttaaagattctttggaatcttattttactcaagagtaaaaagtatgtgtagtaataattatttcataagtatattgagagcattaaatggggaataacaaccatataaaaggcttagcatattagagacttaatacaaatcaatttcttgcattttgcttatcctggatatatcgtgggtttgcttcatattggaaaacaagacagcaacaaagatccatgtttcattcttcagtgacttaaaatattagttgttctggccaggtgtagtggctcacacctgtaatcccagcacttcaggatgctgaggtaggatgattgctggagcccaggagtttgggaccagactgggcaacaaagtgaggccctgtatctacaaaaaataaaaatcgtagccaggcatggtggtgtgcacctgtgatcccagatacacgagaggctgaagcaggaagattgcttgaccttagaaggttgaagctatagtgagccttgtttatgccactgcattccatgtattagttgttctacaaataaaaatattttactttcaaaacatgttttactaaaagtttttcagtaaggatgtaaaaactattaatggtcaactttgactacttccaaaatgctttttttgagtgaaatgttacacctctttgttagttcattgcaataatacttaaatatttaaaattgaaagtcagtaatggtaaatatagaagaattagaggataaaatgagtggagatatggaaaggtacagattgaatataattatttaagtaaaatcctttcctagagaaaatagaaaatagaactttgaggttgaatctcttttaatgtaatgtttttctcgaatccaagtgtttttacactatacaataggagtagaaatttgtcaccactctgtggccaaactcactttttctttctttttttatttttacattaaaaaaaaattttactttaagttccaggatacatgtgcaggatgtgcaggtttgttacataggtaaatgttttattttaaatttaatttaacactttttatttttaagtcatacaactctcatagccagtagttaatattaccttgcaagtttggtatggttgatgaattgcatcctgttaataattgctacagatttttgaataattgcagaccagtttgatggtcctgggttggcataagtacatgaagatttactttttcctgtgagctttcttgggatgaagaaatttagtgtttttttttaatttttaagaaatatttattattttttacatgatttatttcccactgaaaaataaatcccaccgggcataaagtgtatttttttaagtcacagagtaacccaacttgaagctagtttttcagacttaggcagttcatgctgtaagcccgagatctcatggtcacccttgcaagagaaatatctaattgaaaaaaaatatgaagagtattaattttgatagtgctaaaatgacataaagggatctcactgggcttgagatattaagtattaaaattgttaaaggtttaaattgttagtaacttgttattgcatagaaaatgtgccaaatgtcagtaaataaaaaaactttttttaaaataaaaatttacagaaaaattatgacgatactacaaagaggttctgtacaaccccctcccagtttctcttactattaacatcttaaattagtatgttacatttgtcacaattagtgaaccaatattgatacattagtactaactaaagtcagtgttccttttactggagaatggtgttagaaactaaggtctgggcactgtggtatggtggttgctattgagatgttgttatttttaggttctttctcagctgacagagcaaagaaatatatgtgtgtatattaacctatgtgtacacatacatctatgattatttcgatatgtaacatctgtatctttattaagctaaatatgagttcatatggtgtcttcaattctaatcaattactgtatagattattctagcctcttcctcttgcttatctgtaacttcctatttcaaaccgtgaaaaatctgtcttccaccacctactatctgcttacctaatttctcatttccagtttatgtatacagtggcttcagaattattacatatagccctgtgggatacaactttgtcaactagagtggtgcttatgtaagttcttctatctttagttttactgactctactcattttcaaagttgcttagtccagaacatttcactcatactcctcctagtgaagttgtttcatatgttagtaacacagattctttttttgcagtctgcattccattttagggttccctcctctccaatctcctaaattattattttttaaattcatatacatcaaggtttattctttgtgctgtaaagttctataggttttgacaaatacaaagtgtcatgtacccatcattacaatgtcatacagaatcgtttcactgccctaaaaatatcccttgtcctttgcctattcaacccttcccctcctttcccaaactcctggcaaccactgatctgtttatcgtggagctgtgtctcttccagaatgcatataattgaaatcatacaatatgtagacttttcaccctggcttattttgttagcaatatgcatttaacattcatccatgtccttatgtggcttgtagttcattactttttactgctgggtagtattctatcatagaaatgtaccacagtttgtttatccattcgctgattgaagtatatcaatataccttggaacatgactgctagatagtatagtaagactatatttagctttgcaagaaactgccaaactgtattttaaagtggctgtaccattgtgccaccagcaactcctgccagtgatccagtattgtcagttttttggattttagccattctaaaaggtgagtgatggtatctcattgtcgttttaatttgtaatactctaatgacaaatgatggtggatttcttttcatatgtttgtttcccatttgtatatcttctttagtatgtgtctgttcggatgttttgcttactttttttaaactgggttgattgttttctttttctttttctttttttcttttgagacggagtctcgctctttagccaggctggagtgcagtggcgccatctcggctcactgcaagctctgccttccgggttcaagtgattttcgtacctcagcctcccgagtagctgggactacaggcgcccgccaccacacctggctaatttttttgtatttttggtggagacgaggtttcaccatgtcggtcaggctggtcttaaactcctgaccatagatgatctgcctgtcttggcctcccaaagctaggattacaggctaggattgcaagtaggataggcgtgagccactatgcccggctgattgttttcttattgttgagttttatattcctttattttggaatggagtaaataagcacaataaaactggttgagaagataatcattttaaaaaatcataatgaattatatgatacacattctattatttcatgagaaaaatcatggaagagtcagttcaatattcagtgaatcattaatgtgaggatgtaaaatttgatacacacacaatttattgagcacttatcctatgtcaatcagtgcgctaaatttttttcttttatattaactcatttaattcccactacagccctgtgtaatggaagctgttcttcccaccattttataaatgatgaaaccttagatcacactcagtggaagagttctaaagccctatgtggtgctgtctgatagaaaatatattttaaaatgagatgatctaaggtatgtttacctacagagctaaaggaaagtatgtcttaaatttaataatgagtgattatagaaacagattacaggaaatagtccatctttcttgaattatccaaagtgttacaagcctcaaattcattgttgtttgtatgagaacacatttaggtgatcggatacaagtatatagtttttcccagatgtttatttcacatcaacttttttttcatctttactttcttcaaggcaagtaggatagaatgtaataatcaaataggtttttcccccaccccattttagagcagtaaataattccaagaggcatttgctttgttattggataagtaattaacaaaaagaattcctaaagacaattagaatcatgaccatactgggtcttgaaaacatagcagtgcaatcacagccaatggctggcttggtggctggcgatgagcctgcagcatgggactgggtgttccaccacggcttggctgttgtccagggagctttcagtcgctggggttcccacagtgccaagcacgaggcaggtgcagaaaggataaaggtttctgttccccattagtgttgagggcatgcaggtcgtctgacatgaggggcatgagaagtgaagttcctgctttgctttgggtaaggaatctgcattgacaggggcttaagaacctgctcttatacctcacatgtcttagcctggcctttgagatgagtagggagtttgagtgggagtttgagtttcctcttagagaaacagaactgagtgaggcactttcattttttagtttcctagtaccttttgttaaggaaaaaaaagccaaaatgagtgttaaaaatttaaaatttttagattttaaatttgcatttaaaaaattaatgcttttttttttagatggagttttgctcctgttgcccaggctggagtgcaatggcgtgatcttggctcactgcaacctctgcctcccaggttcaagcgattctcctgcctcagcctcctgagtagctgggattacaggcgcccgccaccacacccagctaatttttgtatttttagtagagacgaggtttcaccatgttggccaggctggtttcgaactcctgacctcaggtgatccacctgcctcggcctcccaaagtgctgggattacaggcgtgagccactgcgcccagccaaaattaatgctcttaacatgtaaaaagtaaagtgcagtggaactttggcacttatgcaagataatacaacttaaaagatttataagaatattaactgctaatgaacagtagagggatctaattaacattgaaagttacatgaagaaagtgtttgtcttctattcccaacagggcatctttgtaactataatgactcttgagaagattttgttttcagtcttaaaacaggaatgggggaaaaatgtaggcctgggtaagtacaaaaaagggaaatcgaaggagactagggagttactgtagattttgcaggactgaggaaagtcagaataaatacaagagacaatgatgctggtaattttctttgggctcagagaagtaatgctttgctttgtcagagttgtagtaaaatttagatctaagaagctcgttggaagttgtagcagaatcctgtcttgtttactatgtccactgcctggcacagagatggaacactataagctttccaaaaacatttgtggaatggaatcagaaagtcactttactttccaagatgcaattctttattttgaaacataaatatttaaaaagtttataaatttttgacataattatgacatacatccttccaggcttttttcaatgcttatgcaaacatgtatatgtgacctgtaggtctccttttacccagtttttggagtacaaataaggtcacatctcttcttaactttaaatgtttaaaacattgaagttagcaagaagcccagaaactttttctaaagaactttttctacccctaattgtccaagaactccaagttttcttggttcaaagaggtaatttctgtttctaaacactagaaaaaggagaatatgaaggatctgactagtccattgtcacatgccccaccccattttctgctgcaagagcctctgtcaccacagcattgtgtcactgatgaaaataggtcctcccacagagtcagatgcatcccagtctattgctactattatcaccctgttggaacagatccctgcacaggtcacagcagttcctggaagatgaaactcattctcccagccttaatatcagccaggaatactttattcttggacttccaaagttgctatagtagtttccaaagcccacctagcacctaaggatgggtgagtaaagacaagcttccagtttcagctgcagaaacaagaacccatctcccaccacatagtaggtgttggcattaaacttctctcttatgatgtaatgtgttctccttgggatctttggtatttctgtttgcatacttcatttggggtcatctcaacacaccaaacagattctaactacactgaatctcaaaagaaatagaagtagtctttgtcaagccacagaaaagagcttgttcttctttcttctcctcctagacacctgcatacttttcattcctctaatgaagagggtccattcaataaattcagaagaaatgaagaaaaaaatacaagtctagtttgtgataagtccttgttttcacctaaacagagaagcaagaacataaattatataaggcaccttctcttaattaaataaacaaaagagttctatgtggtctagttacacagagatcacagtgattaactactcagctctggagccagacaactgggtttgttcagattctggcactctttcttgaatttgggcatggcatttgaccttctgtacctcagtttcttcatttgtaaattgggatgttaataataaaatgtactaactttatagggtctttcctgaggcacataatgtaatttaaacaacaaacaagtatacataacagacatttttttcttacaaagacggtaccatactaaacttaatttgctttttttgaaaaattatatttttaggtaaaactttgtaagttaatttttttgggtgaaaaacatgatacaaatttatcaatttgattttgcttcattagcatgatatactttgttctagaaagtacttaggcaattttcatacatgtctttaaatataatttttgcacatgtaaataagagttccaaagtattttgccatcacttcatcagtgttgcctctcaacagcctttgaagcgaggagatgccagtcactgtctcagacacaaggatgcaggctgtggaggccagtgagccatagtcactgaactgggaattggctgtccttttgaccatacagattaatcactgtagtttcaccaatcacattgaacttgaagatcaataaatgaccctaaaacaatgagatttcatagactctttctatatagtggaagttaaagcaaatcagaaaggagtccctaaacctgtgaattcttgaattttagttttccaggtcaacaagccttctttaagtgacttcatgtcccgtccttggtttttgatcatagactggtataagaaatgaccataaaataaatgtttttgagaaaattatagctgaaaatactgtccatgataccactcagtgatataagtctctaaacagcaaactcttccatgaatggggtggagggaagatggtttttctttccaggtgaacttacatattgccttttctcagatatcagattatgagaataatacaatggactgggctttgacagccaagactttcagaattgctgttagtgcccatgtgcaataaaatttttctatcatgtctctcttattatttcaaatgccctgttttactgttttgattactaattatctatttagagggaaacagttataaataaataattcactgttctacttactgtgcacccctgcctttctaaatataactcttctatgtagcatgtaaattaccacagaactcatctcagaaaaaagatcactacttttctttttagaattcaaatttataatatctaattctataggtggcatctggcctttagcatgatatcaccaatgaaaatttaatctgtgttatgaattcccttgtttctagaaaagcttcagcaggaaaatgagaagagaacccataaaaaccataaaacatttcatgaatggtagctttagaaaatcttacaggatttggtagcttttacatttatgacaaagtgatatttttgatgttgttcataattatttcagttcattagcagcattaataagctcccgttttgtacagcttgaagatctttaagacttccttaatgagaaactacctttaagctacggaagacccatcagggtgccaaattccatctggacacagttacaaatacaccactgttgatgagctgaaaattagagcaaccaaacaacagagctttaaaatgttatttcaatgcaaagggacattttcaccatagaaaaatagaagtttgcctctaaataaaaatgattttacaattgcaagagtacttgatttacccctttacatttagttcaaataccaaaaatttcttaaggaatgagaaattccaatgttcctgagaattctgatagcttttagagagttcagttttctgtagcattccattttgcaatcctatacaaatttctaatttataaccagtggtatgtaatgataatttctaatatttattaagtgtttattgggttctaagtgctttacgtctgatatatgtatcacatttaatttatttcatccagtggttcttaactggggacaactttgtacctctctccccaacatatttggcaatctctggagatagtcctggatctccagatctatctgtcacaacctaggatgtatgtggtcctacgagcatccagtgaatagaagctagagatactgctgaacattccacagtacaagggcaacccccacatcaaagaattatccacacccaaatgtcagtagtactgaggtagagagaccctaacttaatctgttcaacaatcctatgaggtgattttttttttttttttgagataaggtcttactctgtcacctaaactggagtgcagtggcatgatcacagctcactgcagcctcgatctcccaggctcaagccatccacctgcctcagcctcccaagtagctgagatcagaagcatgcaccaccacacctggctattttttttatttttttgtagagacaaggtcttactgtgttgcccaggctgatctcaaactcctgagctcaagcaatcctcctgcctcagcttctcaaagttctgggattacaggcatgagccatggcacctgaccaaggtgagtgtatttaacctcattttcaggcaaggaaacaaaagacagaaaagttaagtagcttacttaaggtcacagagctaagtgtggtgccaggattgaaaacctagttctttattgctttagcacaagctatttccactatactctgtcatgttcagagaatgttgatgtccatcagtggattctaaattttgaaggatggagatactgccttattctgtacatctgctttagcacccaagctcttgcttggtgaaaaattaatagtaaacattcatcttttgagcatcttcaaatatcccctttagaatgacattcaattattaggtcagtaaccccaagagaaaacggttgtttgagtgtatatactgtattacaaaataaggggtgaattcaaaggaaaacataagatgcaattcgtgcctccaaggaggttgtagggaagaggggttatgaatgtatgtaaatagaagttggtgtgcgtgtgtgtttataaacagaattgtcagaccaaacattattttggaagcagtaaaagtaaactagaatctggcctagtcatgtcccaggacacctctttcaagtcctgaaacatctttgtaagactgtaatgtgtgtttacatcctaggtaatcactgtggcccactgttgaagagctgtggctgttcttacccttctagcttagataaacttataagcacaaccagactacatatatgaagctgaagagaccttgtctttttttaacgagcttttcttcccgataggagtgactatttcttttcttcttccacattttcaggttttagtgtacttgtgattgctacccacttatcactattaaagtctactcaggagagaatctgagaaacactctcaaattaagttgaacatgatggataagtaaagtattgtgaaagttcactctcatgatttctaatggtgaaacctggcagggtgactaatctttgacgagaaggttatcacttataatctttcatatattgagatcatttgtaagaagcacccagcacattgctgaacacaaagtaggtattaaataaatgttggcttccttttctcctactcatcctcgctcttctttttaatatacctttaaaatgatgccacagaaatggccacccaatcttctatatttaaggtcagttcttgcattaggaaattctataggggaagtatgtgaagtatgtgtagtcagtcattaaatgcttgggctctggccacagattgtttaggtttaaatcccagtttcctcttttattattaattgtgcaacttgcttgggaaaacatgaaacttgtttttcctcaggttcattatctgtaatatatagtgaatgaagaagtttcctgtcccatgaaggtgttgtaaagattaaaaaaggcaaattaggctgtgtatttgtcataataattggcatatatggtaagtgaccaacaaccataaggtattataaaattgttataaaatgatatgagctatcattgagcagcatgaaagaagagcttcactgtttcacctactatcaccctggcccattaatctctttcctgttcctgacatttcagagatacgtttaggatttcaatcatgaccttaagccacatttgaacaattttctggtggataagtcctcattcccacattatgtatgtacctagatgcaaatcctgaatatcatgtcgcaattagtgcatctggacatgcttgctaactgtgttaaagctctgaataatggtaaagttttatttctaccaaaacaaatttgggctgtaatgttttatgataaaaatctgtggtcttcctatgtacatgtgtgtgtacatgcttaaaatgcaatgttatagttaaatgtaattcattaaaagtatgtaactccagtggctacttagtttggctacttggtttgtagatttctgctttcctgtttcattgttaaacaggtctagaagttattatttcatgaaactaatgtgaggaaaaagactatgttgatatataagtgacattatataaatacatgagggatgatttgattagaagcagtattacacagtgataggagtaatggtttagaactagactcaggtttgaatcttagctctatcattataggcatttacttaacttttcttgtttgcttaactgaaaactgaagataataacacctatttacatggttgttataagggttatatgaataatgtctggcaaatagtaagaactcaagtaactgtttcactctttccagaaggagattggctgaaaaatatttggagtctcctccagccatattccttggtcagcttctatgatcctctttggagcttaattcttaatccctttattttcacttgcttgttgataacaaagaagaactaattattaatttatttcaaaatgcatgtattatatttgatgggccacactaacagttataaaccaaacaacagattgggaatggggaagtggatgtggtgagttcaatcacatgtctgggaaaagtcaatagtgaagacagagtctcacaattttttgtcataatggagagatgaaaacacaggtagaggatttcaaacaacagagtggatggtgagttaaaaatgctgaaattctttcctggtgtctaacttaatgcaatgtggtttatctctttgctcttttctctactattcaaatttaggataataaagattaaatgtttctaaatcttactttacaatatcaagaaaaaaaggtatgcttttgcccacggaagggcaaagcagagctatgaaaacctgctgaacacattctttattttcaacacaggttcttgtctttccatcatgaaatgcacattttatttgtactgtatttgggtgaccacaagtcaacaacaagataattcacaagacccttgccttagatgtgtcggcaataaagtaatcaggccaaaatttttactttcctttgaatttttcaattcaaacacaatgtatgcttgcttttacacagtagggttcagggattagagggttggctctttaaaaaccgtcagagacacaggcaatcctacacaaaattctcagaaggaaggcgcctacgcctgggaatgcccagatgcccctcagagagttgaagatggcgtttctctgagtcaggtcaaagttaacacattaccttcgcttcaaagactgcttggcttcctttcggtggattagtcaagatgttttgctgactgagactaggaaatctataggagggcgggttagtttacattgttccttgtcattatcgctaaaacactccaaagccttccttaaaaatgcgcactgggctaaaaaggatagacaaggaacacatcctgggccggtaattacgcaaagcattatctcctcttacctccttgcagatttttttttctctttcagtacgtgtcctaagatttctgtgccacccttggagttcactcacctaaacctgaaactaataaagcttggttcttttctccgacacgcaaaggaagcgctaaggtaaatgcatcagacccacactgccgcggaacttttcggctctctaaggctgtattttgatatacgaaaggcacattttccttcccttttcaaaatgcaccttgcaaacgtaacaggaacccgactaggatcatcgggaaaaggaggaggaggaggaaggcaggctccggggaagctggtggcagcgggtcctgggtctggcggaccctgacgcgaaggagggtctaggaagctctccggggagccggttctcccgccggtggcttcttctgtcctccagcgttgccaactggacctaaagagaggccgcgactgtcgcccacctgcgggatgggcctggtgctgggcggtaaggacacggacctggaaggagcgcgcgcgagggagggaggctgggagtcagaatcgggaaagggaggtgcggggcggcgagggagcgaaggaggagaggaggaaggagcgggaggggtgctggcgggggtgcgtagtgggtggagaaagccgctagagcaaatttggggccggaccaggcagcactcggcttttaacctgggcagtgaaggcgggggaaagagcaaaaggaaggggtggtgtgcggagtaggggtgggtggggggaattggaagcaaatgacatcacagcaggtcagagaaaaagggttgagcggcaggcacccagagtagtaggtctttggcattaggagcttgagcccagacggccctagcagggaccccagcgcccgagagaccatgcagaggtcgcctctggaaaaggccagcgttgtctccaaactttttttcaggtgagaaggtggccaaccgagcttcggaaagacacgtgcccacgaaagaggagggcgtgtgtatgggttgggtttggggtaaaggaataagcagtttttaaaaagatgcgctatcattcattgttttgaaagaaaatgtgggtattgtagaataaaacagaaagcattaagaagagatggaagaatgaactgaagctgattgaatagagagccacatctacttgcaactgaaaagttagaatctcaagactcaagtacgctactatgcacttgttttatttcatttttctaagaaactaaaaatacttgttaataagtacctaagtatggtttattggttttcccccttcatgccttggacacttgattgtcttcttggcacatacaggtgccatgcctgcatatagtaagtgctcagaaaacatttcttgactgaattcagccaacaaaaattttggggtaggtagaaaatatatgcttaaagtatttattgttatgagactggatatatctagtatttgtcacaggtaaatgattcttcaaaaattgaaagcaaatttgttgaaatatttattttgaaaaaagttacttcacaagctataaattttaaaagccataggaatagataccgaagttatatccaactgacatttaataaattgtattcatagcctaatgtgatgagccacagaagcttgcaaactttaatgagattttttaaaatagcatctaagttcggaatcttaggcaaagtgttgttagatgtagcacttcatatttgaagtgttctttggatattgcatctactttgttcctgttattatactggtgtgaatgaatgaataggtactgctctctcttgggacattacttgacacataattacccaatgaataagcatactgaggtatcaaaaaagtcaaatatgttataaatagctcatatatgtgtgtaggggggaaggaatttagctttcacatctctcttatgtttagttctctgcatgtgcagttaatcctggaactccggtgctaaggagagactgttggcccttgaaggagagctcctccctgtggatgagagagaaggactttactctttggaattatctttttgtgttgatgttatccaccttttgttactccacctataaaatcggcttatctattgatctgttttcctagtccttataaagtcaaaatgttaattggcataaattatagactttttttagcagagaactttgaggaacctaaatgccaaccagtctaaaaatgcagttttcagaagaatgaatatttcatggatagttctaaatactaatgaactttaaaatagcttactattgatctgtcaaagtgggtttttatataattttctttttacaaatcacctgacacatttaatataggttaaaaaatgctatcaggctggtttgcaaagaaaatgtattacaaaggctgctaagtgtgttaagagcatactcatttctgttctccaaaatatttcataaggtgctttaagaataggtatgtttttaaaagttaagttcctactatttataggaactgacaatcacctaaaataccaatgattacaaacttccttctggccttctggactgcaattctaaaagtgtaaaaaacatattttctgcattaagttaggcagtattgcttagttttcaaagtggtaggctttggagtcagattattttgattcagatcctacatctactgtttagtagctctgttgcctgaggcaggtcccttaacatctctgtgtgtgacttgacctttaaaatttggagactgtcataggggttaatcccttgagaaaatgaatgtgaaaagttagcctaatgttaactgctattattatggattaccatattttcacattcatcacagtacatgcaccttgttaatataagatgctcaattcatctttgagtataattttgtgactctcaatctggatatgcaatgagtgggcctgtatgagaatttaatttatgaaaaattgtgtttcacatggccttaccagatatacaggaaacacgtcacatgtttctattgtatgttgttaaatgccttagaatttaactttctgaataggatcccttcagtttgagagtcataaaagagtaaaattattatggtatgagttatagattgtattgaatatctctttatatgtctaggttttgtcattggaaaaccaaaaagtttggaaaaaaaatctaagttatttcttactttcttaattttgtgtggatttcacatcaagtataaaatttgaagaacatctgaactatcataatccatatatatatataaaataaacataatctaagagagaatttcaccatgaaaaattcaggtagttcatgactatcagagcaaacaagtacattaaattgaaacttttatgaaaataacatttatgaaataggaagctatttttaaactagaagtgatatattagcatataatttataattcatatacaagtgggattgatttataaatggtcaccaacagagattgtgctatttaatttgggaaaattttttaaatttacattttctcacaacttttaaggtagttattcagtttgttcctctctgtctcttctctcatgccctgaatttttcatatttcgtttagttgtaagagtgtatatcaaaccgtgtgtcacatgacataacttgaattttcgtcgtgatatctgtgctatgtctaggtctatactgaggaactgtgggaaccccacagaatccaagtatacagtgccactgatttcttacaagggatgtggggtctcctgtaaactctgcagttagtctcaagtaagaccaaagagtaaaatattgttaggatctaaggtggaaattcagcaaagaatcacatagtctaagtctcgagtttaacagtaagataatttgagatacttttgtaattattaaacacaaagtaatgagagattttaaaacaaacaaatacacctgaatttatatatcagaataggtatggtggttcaaaatagctatctaataaaaaccacactcctattctaaacatttgcctttgatcaaaataattttgggtctcttattatgaaattgcctttctaaataatacataaatttcttctcataagtatatattagccacattattttattgttattgttttatattcatagcttgctttagattaaaaattatattacccagactggtctcttggacttgcttccaagtgacttttgactgtatcacaaaatcaaattcactctgaaaatataaagatttttcatcataatttcctttgttaacagccaagtgctacctaattttaggtgttttcattaaaaaaaaatgcattgcaaactttaaagacaattcttttgtttgtttgtttttaaaagacagagtctcactctgttgcccaggctagagtgcagtgacacaatcataactcactgcaacctccacctcctgggctcaagtgagccttccatcttgcctcacgagtagctgggtcttcaggtgtacaggtgtgtaccaccatgcctggctaactttttttttttttaagttatatagagacagtatctcactatgttgcccaggctgctcttggagctcctggcctcaagttatcctcccactcagtctcccaaagtgctgggattacaggcgtaagccacctcaccctgtcagcctaaagacagtgcttaatgaagagaaatataagtgctttgagcaatggaagtataattaaaattatactatgaaagatttataaagatgaccattttgaatgggaccacacttatttggttatataaattatgatacactattaaaaattcatcatgatgattttgtatttacattttatttacatgtttgcaatttgtgaggaaagctaaaattatggctaagccataaatatttttgcagtttgttgagggtgtttgtaaaagtgttgccaaggaagaccagttggctacccaaacaagggtttagtctaggtctgatcaatacatacacattatctcaggtttgtctatcagaaaaaccttaggttatccaaatcaaaataaaatagatgcataaaacaaaggccaatatgtgttgaacaattatattgtgatatacaactgccaagcattcccgattaccatgactccatttagtcagtccatgggcaaatgccatcaatgaggacagcccagggtttccatattctctcttggctttacatcctataggaattggaggggcccacctctgggataggagcccttctgtcttgaacaatgttgtctgaacactaacaaatgttgactttctacaccagtccctcaatagtcttttctatttatccttttgctgaccatgttttgttattacacagttgagatttttcagctgggaatctgtgttaattttgtattaattttgattagcttaactctcagagttctaaaagtacctcctgtacctgatatatgacaaaaattataattacatttatttatatataaaatatctttgtatatgtaaaatatctttgtatatataattatataattgtttcttttaattttgcaaattttaaaaagttctcctttgttttgaagtttattcctatagttttttatatgctagttaaattattaatcacttgattcaagtaatattcttatatacttataaggaatagtgtagttttaatatttaattccttgctaaagagagaagtggaatctatttttcttagctacttcatcaatattttatgtttgatgtgacagtcaaaatatccctcagagctaactgttacactagggaaatcacggttttccagttttccatttatgtgttatgggagggagtggaacttagtgtaataatattcaatacataaatgttaacacttgtttaaaggtccttgagtgagtactgctataaaatgcattattattgctagtgtcatttcacaagagcctataatttcagtgtgatagagctacaatataagtatagtattgcaaaaccatcaggaagggtgttaactatttagcatgcagttatgtgttggttgtcaaaacgttaaaaacatctctgactcagcagcaattttggcaattttgatcctgaggcatctgtgtagggcatcttcctggagaaaaacctctgagatgcaatgaggtcaaaaggggaaaacagactatgataaagatcaagttgtttggagatcttgtagaaagattaatttacaaatatgtcaagtgcattatcatggaggaaaacattgctatttctgttggttctcttcagagctctagaatcaatttaccacatagttgtttcagtgtgaaattagcattacagagtggctttacggctttactgtagggcattgtgtcagcaaagagcttaggcttcttttagcaagaagcttgtaaaaatttaatttactcttagattgcttgatgtagagaattacattcctacagagctctgaaaaatcttttttcagagtttttcacagctgtattcaagttgcaaggcttgtcaactttgctatttttctgtgcagctctgttaacttattattatcttttgacataaattatgattccaaattgtaaagctctggatgtcagggccttttctaatttgtttagtatgatattcagaccatttcaagactcttccgtggaacaatttaataaagatttttttgtgatgttaatgagttcatggtgatcaaccctagagacctgtgtctattgtagatcgatgacattcaacagtcctgcagtgctggcatcattttgataaaaaggggtcaaagcaagtgggactgtgggcagatttttaatgcttagaacaattattccatcgaagttttcttgtgtcccttctgccttagcctttgtaggatagcatgcttgctaatttcttgctcatggggtaaggaaatgaagatttttgctaggtccgtaggattattaggactactcaggcctgaagctatgcctggatatagccagaaaactctcccatagcttgctccaaggagctgagatacagcagtacttcctttgtaggtcatgattctgggtaacctggaagatgacctcattcatattctgtattctatgtgagacgttaagaaggtagaggtggccaagaaggaaattgttgctgcctttatggaacaaattatctgaaacccagctttctcgagggcttcattgaagtactcaactggggcacttaacccagtctaaggctggtcaaggaaggcttgctgggggaagtgtcttttgtattcacacctaaaggaggttattcaattagaattatccaaagagggtagggatgggctaggaaaaatttaaacaggtagtgtggaggactgacaggataagtaagcatggcaccttcaaaatatcctgagaagttccctatgacgggaacataaaatatgtgacagagatttgtgggagatgggtctggaaactctagcaggggccagatcgtaagggggctttgtaggctttgtaggctttgtttgggctttatcatactggaagtgaaaagccatggcttttaaacaggagagggacataatcagttcatatactgttgcagttttgtaaaagaaaagatgagctgaaagagtggccatggtggaggtgggtggggtgggggggagggggcggggagagagagagagagagagagatttgaaagacatttaggaggtaaaatcaactggtttggtaatcaattagtagttgaaggtgaaggaaagagaagagttaaggataacatctatatttgttgatttggataatagaggggacagtggtgctgcttattgaatgagaaaatttaatcggagaagaaggcatggagcaggagtgcagacctatgtgactctacttctctcaaaaccagaaacggaaatgatgtatatggctcagggttaggtaatatggttatttgaaaatgtattaaagtgatttagagcttagtcttaggtaagagatataagatgtctgaggtgacagttttataaatatgtagagtgcccacttgtttggccttattgtggcatagtgtgacctgagagtgttaggaagaagcagctgagttctagggacagtactggttaaattctacttagaaattatacttagaactctcctatataacctgctaactgatgtctgaacctcctgataacttcactcctttaggcagtgcttttcacatcacgggacacaacatatgagagatcatagaaattcaatgtggtatgaaaatctgcttgggacttcagatattgtctccagtgattgaataaaaataggagctcacctactatgatgaggtttctgtgtgtgttaaaagaaggttttcattacttttgaaaaggttatgtatccttgttttatgttaaaactttgagctttgttaaatatgcagagttctctttcttagcatggactacagaggtgcaactacctcctacctgacttcacatctactcccaaatgcctagtgaaggcttaataatttcaaaaagggactctagaatttcatttgataccagtcagacaaatgtgtgaaaattaagcataataggcagaatcccaggggtactgacagctgtattaagaggtgattcaagggctaaaccttagagtccagcattggttatgggtgtgacaagaaaatgaagcctatgttggctgggattagcaaccacagttctagaggaagcaaggtggagaaactatatagggggctccctttgtacgttttatttattttaaacatctctataaactctagaaattaaaacaacaataccaacacaaaagcatcactttttcgaccaaagaccattgctatacttttttgtgtaaagggctagatagtaaatattttcagctttgtgggccacataagtctctgcaatagacaatatgcaaacaaataagcatggctgtgtttcaattaaactttattatgaacattaaaatttgaatttcatataacttttacatgttgcaaaatattctttatttaaattctattgcaatatgctttaaaagatacagtttttagtctttcttagtttaaaataaaatctagaaaaaattttaagtcttctataactttttttcggtaactgaataattttaaaagtaagtgaaacatttagacatgcaaaatggacttttcagaagaagaaaatggtagcttaacagttattagattattgtccagaataatttttgacttataagtctctgttgaccatttcattgcctctttttttggaatatgcatcttttaatgtgtccttcaaggcaaaggctctatcttatctatcttgtgtcttgcattttcccagggcaatgtttttcacaatttttttaaaaaacaatactgtaatcaattttcaaataaaattttccatgggaccgcagtgtatacaaatagcagtgacaataaaagataataactctcccataaatacaaagaaacagttaacctagtgctctaaagtaaaggctacagtgattttgtataacatttatatgtaattttcttgatcctacatggttgtgtttttcacagtgttatgtttctgaaatcgagatgccttttataattgatgtcaaaagaaacttgtcagccacaaggcccaggaataagttgtaatatgggaacttagcaatacataaaggtatatatactcctgtgacctcagctgaattatttgcattggttgcatcccacaaggttgactcttaaataaatttagtttgttgcttgaaatttcttgggataaattactttgtgatgtagttttgaaaaaaaaacaggtaatatttagtctgaagtttgtctgacatactaagcaatgtaattaaagtagaagtcgcctaagctcagcactttattatgccttgaaattatactgcctgtcctacaggtgaaggtgttatgaatgcagtttgtcactgtaactctattcatagctctgaaaggctgagagtgactcagaagaatatttttgctctgaatatgaagaacgcttagactaaaactttaattacgatgctgaagaagaaagtggtaggtgattgcatgaataagtatgtaatattgttaatttctaaaaactgtgtatagttaatgtagtgcttctttttggaaaggctattgttaaattgatggtaaattctataaccaatatcaccttaaagcaagtacgcatgataaagtattataaaaccatgataatatcatatgtggcttattattgttccctgagtgttgtacaactctgttatgctgtgatgaaacctcatgcaaacaggtatgtcaaagatatgatgggctgttaactgagcttggcccacatatggtgtagtgacatgctcactaatgcagtgcagagataaccaataacagatcataacaggtttaaatatgtgcaaggagatgtcagcagaagctttcctacatagtgaatactaaacaagcctgacagcccaggatcatgttcggatcaatctagtgtgctaaaattaacatatagtcctacatttgagaatgtgtgattttcttggttcctgtctataaaataatattttaaaatacatacatttcaaatcagaagttggtgaattcactgaaatatttctagagaacactaggtattggggctcatagtgtgaaaaccactgacttaattcttcccccatcttggttgttcctgatcttcccttgtgtccccattccagccatttgtatccttagaaaatgatctcatattctacttcatctttatcttcattgtcaactgtcaggtagcaatatatgatggaagaagcatgtactttggaatcagacagacctggctggaatcctaactctgtcacttattaacaatgtgatcttaggcaatttacttaatctctctgaacctcagctactctcgtcagtacaatgagttatccttatctttacatggcacagtattattatgatatcaaaaattcattgagtatttactctgcatattagtcaaggttctccagagaagtagaaccaatgatacacacacacacacacacacacacacacacacacacacacacaatttattataaggaattgacttacatgattatgatggctaacaagtccaaaatctgcagtatgggtcagctggcaggaaacccaggagagtcaatgttccagtttgagtctgaaggcagtctgttggggaatttcgtccttctctgggaggccagcctttttgttctatacaggccttcaaccgattggatgaagttcacctttattagtgagggcaatctgctttaaccaaagtttactgatttaaatgttaatctcatccaaaaacacccacccagttgacacataaaattaaccatcactctctgtaagcactttctatgcattaagtgatagcaaataatgccagacatagggcgtctttaataaatggtaagcactgttatcagcaacaacaggattattataattagcaccttttcatctttctgtctgggctctgagaaagtacctctcttctctaaatttatccctcctttcctatgaattagacccagtgctttctctgaattatgaaggtcacactcctacaaatgccccttcccaattgcacatctgtcggctttctttgccattgacttttatctctagcttttaaatttacaggcatatgtcagttaacaatgggaatgcgttctgggtaatatgtccttaggcaattttatcgttgtgagaatactatagagtatacctacacaagcctagatgtcgtatagcctactacacacctaggcaatatgacatagtcttttgcttctaggctacaaacctgtacggcttgttactatactgaatactgcaggcagttgtgacacagtggtatttgcatatcggaacatgtctaaacacagaaaaggtgcactaaaaatactatgtagtgatctcatgggaccaccattgtatatgcagtctgctgtagactgaaatgtcatgcagtgcataactgtatcttaaatactcaaagtatcacctttgtttgtttgtccccttgtgtgcatcatcctaacgtggaatttctctgttgattagggccagcgtattagtttgctagggctaccataacaaaataccacaaatttggtggcttaaataacaggaatttattatcttatggttttgaagactagaagtacaagatcaaggtgttggcaggtttttcttctaagggccatgaggaagagtctattccatgcctttcccctaccttctggtggtttgctagaaatccttggcattccttgacttacagaggcatcaccctgatctctgttttcatcttcacatggcattctccctgtgagcctgtctctgtgtccaaacttctttactattaatataaggacaccagtcatattggattagggtctactttagtgacctcattggaatgttattacctctgtaaagatcctatctctaaataaggtcacatccttaggtaccgggggttaggactcaaacatacctttttttggggaaacacaattcaacctataacaattgataacactctttaggagcagaatgcgatatggaagtaatttgagaccataaagtatatacatgtagggagttaatctatgaaacctattgaaagccatatatacctcatgtatagtggtccataaatagcatggagacattgcagaggatgttaagtgatatgatacaggaacaatccaagaaggtcataagaaaaaggaccttttgctcttgagaggactgaagaatgactttccatttatgaaattttggtacatgtccactaaaaataggatgaaggccaaacttaggaagaatattttgataatggagaaggttgcatataaaaacattttattgaggacaattaaataatgttggctggaagttttaggatgatcatctttaggactcagaaaaagagaagaaacattattaaagaattgtccctgaacaagtataggcaccctcacatttgcattgcatttactatagaattgaaaaatgttttgaccttttttttttggcttttaatatatttgaccaagagtaacagctaagcaatacctatttgcaatcagtgtcatcatgtgggctccaaacatatcatgtttgtgtaattaattgattgacccattaatttgttcaatttctgctctgttccaggcactgaacaacatgatggagataaaagataaatattacacctgccttgtcctcaagaagttagtcttctgagggaaagaaattagcaaacaaattgtaatctcagttatgtgccatgttccatgctgggcacaggggatacagtagtttaaaaaaaacacaagatctataaggtgtttcttcttgtggaccttacagtctagggtgcttggaaacatggggcgttggcagacaagtaaatacacattttgtggtaaaggctcaggtagaagaagtacaggatagaatagagcacaccatggggaattaatctagacttcagagaggctcacacatacataatttatgtgtgactatttcaatgcatttgaggtttcttggaaatagaggttaggttttattttaaggaagttaccattttttttttcagtgtgatgtggttgaaccaaagaatgccatgcccagtgatggtaataggataatctttttaaaaattaagagccacctaataaatcaatagtttcattcagcgggagctcctgcagagttcaaaaagaagagaatctggcacagcgtttcctttaaagttcattttcctagagtgtgaatggaagcaagagattataacattttgaggtcaaaaaaattctgaaatgcctataaaaattattttctccaaattatcatcatttgtgcttttaatgacctgattgcaaagatgaacattttgaattcttaaattgcttattaggattggttaatgaatcaattatctattactgtatgttttgctattggaaaaaatagcaacttaagtgttttgcagacctttacttaggtatatgttgcttttatgaaaaaaaagatgtaaatattaagtaaaagggatttaaagcaaggcttttgaggtagagtcttattaattccttggtaaaccttgagccaattgttgtctatgttctctgcctctgtcttgctccttccttctgggattcactgtgggaatgcgggattgttaatctggggatgctgtccaatcctgcctctctcaagctttgctattgatctccctcccagtgataataaagcttgaagaaaatgaaagtagcgttagtattggtcctcaaactcaagaacaggatgaaacttaaatcttgagtcatacaattgtgtctacatactgctccccaaaaagagaagtaaagaagatgctaactttcccttttaatttgcagtacttagcaatttgttttcttgagggttaagtaataacagtggaagaaaaaagggttaaaatgccaccaagaacccaattccatgtttagtttgaaagtgggaaatcagctgccactgggaagtctgaatccaatgccatgatgttctttgaatccttctgagaaataatcatgtgtagccataacatacctgtataacagagcagagaacataaacaaatgaaggtgaagggaagattaagacagaagagaaaaattccagaatcgactgatcatttttatctgtttagatgatttcaggcagaatcctagagaccaactttatcacaactgaattttaaaaatcaccagctttgtcattgtgatgcagcatcagtttcagtattatccttggagtattaattcttaatcatcttcatcttagaacatttttgaggtcacttctagtctctatttcaccagtgaagaaacaaaaatccccaaactatatcaggtggaattacacagtattttttttttaattttggggaaagtcgattcaaggcagtaacttgcaagctagtgttagaaaggatttaataaatagtggtttttctgtacacatagtgagaggtcattacatcatttggttgttgaaagtcataaggatgtctagcatgcgctttgcctgtagtggttcatgccaggcagattcctgactcctataacccagagcttatcagagcatttatgtccccaaagagaaatgtcacctccatctttcaataaacactttagcaaagaaaaatcaagtactttaattccaaatcttgagttaattccagaataacaatgatggctcggaaaaatatgggtatttctgtcaaaggacagagaaacctagtagagagtatttactttgggtcctagtgatggtatctgaacaagctaggtgaacaaagagcctcaataagggattttgaggtctagaaaaagagaggaaataccaaataaatggaataattataaaataaataccagcaaagttaaatcaatatatcatgtgggagatatccttatatcactcatgtgatttctattttgttcctatattaggccaaggagaggtggaacttgttttcctttttccctctcagctacgaatggacatacttaaaactgtttctctgcttctgttctctaaaatgtgattgtctaacagtaaccgtgatgacgttttgacagttgcacaagtttctttctttaagctttaaaaatgccagccagtaacccagtggcatttctactataaaatcttaaggccaatccatttccccttttccttattttcttggtttcaaatatatttttattgccaatggaaataaaaatcctaaattagagagcaatggcatcccttgtcttgtgaataaagagctcctaaatgtgaacttatacaggatgcagcaatttatagggtagttaatcattcttctttctagccagttgttccagctacagttttgtggctcttgttagtggcttcattcccagatagaataaaaatcaaaccaaaatcctggaaaggcactctgaggatgcttctctaaagtagatgggcatcaactataaatcacaatgctttgtttcctctgttatgtttcaagatgggtgggattttttttgtagcattacttattattgcctctcaagtgcttgagtctttgaaatccaagtcatgtgagtgaattagatacagctgttagaagtggcctttcaatgccaatggtacacattccttggtttctttacgatactattgctcttacaacttttatctgaagtcataaattcatagttgtcccagaagttaagttccttgcttctagaggacagaaaacaaacaatttacacaactcatggtgcatgtcaccagtccttagatctcatgaaatatgcatgaaatcttaaatcacttgctgtagccacccagccattgacatatttgaaagactttagtgtatcaaagtcactataatgaaaattttgatttcaccagttctaggagtgaaaaatcaaatgtttagtaaaactttctaaaattaacactgacagttgatttctgtatactgttgttcttaataatagctttattgagatataattcatattcaaaacaacttacccatttaaagcatacaatccaatgattttttagtatcttcaaagagttgcctatcaccataaccaattttagaacactttcatcactgtaaaaagaaactccattcctattagcagtcattccttattccaaatccccctgctcgccctagacaactacaaatgtactttccatctctatagatttgcctgttctggaaattttatgtaaatagaacaaagtgttcttttgtgactggcttatttcacttagcattttttttcaaagattcatccctgttgtagcgtgtatcagtgcatcattcttttttatttttttagagacagggccttgctctgttgcccaggttggaatgtgcagtggcatgatcatgggtcactatagctttgaagtcataggcgaaagcggtcctcccacctcagtctcccgagtagctgagactacaggcttgcaccacatgactgtctaatttataattttctttagagacagggtcttgttatgttgtctaggctgctctcaaactccagggctcaagtggtcctcctcccacagcatcctaaagtgctgggattataggtgtgagccacagcacctggcttgcatcattctttttattgttgaataatatcccacttgtaagaatatgtattttatttatcctttccccagttaatagatatttcgattgttcctaattcttgtctattataaataatggtgctatgaacatttgtgtacaagtttttgtgcagacatccattttcctttcttttgggcatatacctacgagtgtaatggatgggccatatagtaactttatgtttaatattttgaggatttttcaaactgttttccaaagtggctgcatcattttaaattccttccaccattgtgtgagtgtttcaatttctccacatatttgcaacacttactattatctactcttaaaaattacagccatcctactgggcatgaagtggtatttcattgtgagttttttttttctttttctttttttctttttttgctaatgtttgtggattttcttttcattttcttgatggtgtcctttgaagcacaaaagtatttaattttgataatttccaatttattttttgttattgctgtttgtgcttctggtgttgtatctaagtgtatgctactttaaaaaattagttgtaatatggcaaattggatacatgtgtaggctttggtgtcacaatcctaattttaaaattctgactctgcccttgacaaattaactaattaagcttccttagcctcagtttctcaactgtaagttggagatattaccaagacctacctcttgaattgttgtggggatcagatgaaataatgtatgtgaaatatttagaattatgcaagtctgtggtaatgaatactaatgttagctatcattattgttataatcccaataataaattctggtgctttgaaaattaaaccaaagccaagcagttgatatgaagaagcatgtaataatgtacagacataatgctttatagacaacattgaatttggctctcatgaacatcaggaatagtggtcatggtagttattatctccagcaggaactgtagctgagagatcttcagagctttttccaaggcgatatcactgggaaataatagagacaaggttacaagctagggctgtgttttcttcttaaaatctttagttcagtttttttcaataacagatttgtagtaggcatcaggtgactggggattcgtattcttcaagttgaaatattaccttgttgagaaagaaaccatgtgtgagacaaccatgttgagaaagaaaaagtgattttatagaaaattaatattgatagtgagcattatatgaaaatcatgaagttagaacatatttggccagaaaatttacattaatagttacccatagcaattaatgcattataattacacataccttttctttaatgaaaaagaattctttccttccaaagttatgcatgctattgttaaacattagagaatatagagaagcaaaaaagaaaatatcttttttgatattttcttaacatacgtctgttcctaataatgtttatagtttagaagcattgcatgaaatgggtagatcaattttctatttaatgtttggattcattaggtacgaagttagcaaattaatttccattagggtgcctgtatggttgtaaatcctggacctgcagaagatttttcagtattggtttgtagtcttttgtttagcagcaaataattagttctccagagcttctgaaattaattgaccactttaatggtgtttacctacctagagaaagaaaaagaacttctccaagtcccttggtaaaattaagcctcatgaacaattaactcaaatatacacaaggcttgtctttagcgagcatatactccctaaagttgattaagctgaccaagtgattactgcttataaattcaccattttatggagaagaagcaaacactgctaaataccttgtggaatcagaggaggggaaattagtaacttgaccccaatactgcgattttaaattgaattcttgaagcctacaagttttacacaggactttagagagctggatagtatcactttgtcaagtcctacttttactatgattctttgagaaaaatacatctgactaaataactctgaatctaaattggataaaataaatgtgacattcaaaatgttatttatgattttagaaaaatatccttatagacactagatgagttttagtctcaaatcaatcctccctatcatagtcacttatcaaaataactaaagcaaagtggtagagctgtgctctagaagtttgggatttatgatcacaatcttttccaatgagtcccctctttcctctgcctgtcttcaacatttgtttttttttttttttggttaggactatccagattgtgtggcctatttcaaactcatggcaaatacattggatgatcagaaattttctaatgtatttgaatttgtctacacaaactagagtaattgctattaattcctcaagtgttaattatttcatgcaaaaaggaaaaaggctattagtctttaagtgtattagtatgtcaatatttgggagaagtgtcatgcaattagtggtttgaatttcctattttattttattgcattttattttatttgcctagtcaaataaaaagtaatgttaaatacatggaagcatgattgttttctacactaaaaatcattttgacttgaaaagatctgatatccatgaccttcatctgaagttttggcagatgaaaatgtcagatgcgtcttttggattaataaaaggcaaaagtcagatcgaaaaatgagtataagctttaattatatgactttaggaggatatgttatgaaaatcaaagctttaatagtgattataattggcaagttctttttttataaggaattacaagtcactctatacaaaaattggaatttttgtcctaagaaatgaaatttactatagtttcatctgtgtgtgtgtgtgtgtgtgtgtgtgtgtgtgtttaaaaaatcaagtgatagggcttttcctcaataaaatctgaaatctcttatagttaagtgaacagaacagtgtatctaggatgctagacttttttttcaaagttagtttaaaacttatacatagtaaaatctgtatgccttagggatctctgtttgctatcccatagtgaatgattaattagtttctgttagaaatagtcagaactaggctgggtgtggtggtggctcatgcctgtaattccaggactttgggaggccaaggcaggaggatctcttaagcccaggaatttgcaaccagcttgggcaggctggtgagatcctatctctacaaaaacaaacaaacaaacaaaggacaataagaaagaaagaaatagccagagctttgaacaaaatttctaagtagaccaatgtaaaagtctgtcgtcaatatgtagtggctatgaatggaggttatgaatgaaagagaaggataagatgaactagaggtgagaggggaagacagcaggcccaagtgaaaggcagagccgagtttattgctttttggttattccaggtgtgtctgctttgtctcatgaaacacctggatgatcactgatttctagtggaagaaatgctgaaaagtccttactgtgcatttaaacattctaggtttaatatactcagggtttttcaaaagaaagggtggctggagttttgcactaactaatatttcataaagtgtctaagtatagatgtctggtttttttttgtatttctaagactggcttgaggtaggcatggagaattctttgatgggacataattttcttcctttctttttttttttttttttttttttttgagacggagttttgctcttgttgcccaggctggagtgcaatggcacaatctcggctcactgcaacctccgcctcccaggttcaagcaattctcccacctcagcctcccgcgtagctgggattacaggcatgtgcccccatgcctggctaattttttttgtatttttagtagagatggggtttctccatgttggtcaggctggtctcgaactccttacctcaggtgatccacccacctcggcctcccaaagtgctgggattacaggcgtgagccaccgcgcctggcctgatgggacatatttttcattcaattttattgatttaacctcacaaaataaaatatttccttaagatgactctgtggtcattgttgggcagcataagcttaatggattttagttatcataatttaccttaaacccaatttgtatttcaggatataaatagaggtttattgtagtgaatcttccaggaaatactaagtgatactaataattatagatggtgaacttaagtctttatattactgaatttgtttggtttgatgatgctaggctatggcattcttgctaatcaaaacgatgtgtcatggtgtaacataacttattaaaatgggcacagataacacaggaagctttttataaaagcagctcacaaattgtgttactttgaactgaactggccatttatgggaaaggtcactgggttgtaaataaggaccaaaagagttacgtttatattttttaaaagagattgaggagatttatttttacatttcttgaaaatgccttattttggtatggtattgacagatagtgaaattctgctcatttgtaaatatagtgtcatattttaataatttcaaacatattgaaaatgcagaatttattaatagtgggagcacattttcctttttactaaatgttctacaggttcttttctttccatccacacacagtgccattaccctcattctaagcctttcaaacatctggcagtaagtgatctgctgcacttagctctttccagctgagctgatttttaaattttcagaaaatttgtgagctaattgttaaacatggccattattaaaaattaaattatttcaacttataattaaataaattatattaaaacaaaagtattaaaaactcaaaagttggctgggcgcactggctcacgtctgtaatcccagcactttgggagaccgaggcaggtggattgcctgaagtcaggggttcgagaccaacctgaccaacatggagaaaccctgtctctactaaaaatataaaaaaatagccgggcatggtggtgcatgcctgtaatcccagctactcaggaggctgaggcaggagaattgcttgaacccaggaggtggaggttgtggtgagctgagattgcgccattgcgctccagcctgggcaacaagagtgaaactctgtctcaaaaaaaaaaaaaaaaaaaaaaaagaaacaaaaaaaaaaaaaaaacaaaaagcaaacaaacaaaaaaacaaaaattatcacttcctaattattttgcattttactattatctatgctattaacgttatttgccttcattgtatttgaaaggtggactatattctattgcactttcattgtactatattctaatatgcaactgtgtatcccttcccaactctgtgttcaatgactttatatttggttgctttaaaatgatgacgatgagagtatttatatcatagaaattggcaaatgccgtaagtcagtttttgtttttgtttttgttttccggagaggggattgttaaatatttgcctgcatgcaacaccactacatgcagtctgctatcttttgttcttcctgctttcaggctcctctcccagctgtctgtctagcacaacccagcataccaaattttcttaaatagggaaagttgaacatggtaaaagaatgaatgaagtcaaaagaatgtggaaagacctaggctttgccatttagtaaagtttagcatctctaagcctccatctctttatcaataaaattgagcaatgatcccttttagttctacccatttaagaagattttcaaatgaaaaccacaacctgctcatgtttatgaaggcactttggaaagcgctaaatacacgggtttttattagtagtaaacacttacttcacctttttcacttcttgactttagtttacaagggctcataatctaaattatatcataaattgctgtcccagatttttttacagcctaattgccacctgtatgttcgactttccttctgttctttatgttagatactgggatagtatgcaccaggtgggtgtgccatcactttctcagatgatgtccactgaagaccttgcatgatcatggcattcattttcctgctgtattcagactggcctcaactattttctttattgctctccaggaaaaattacaaatgaatcagactgggcaatgaagggtaaacctaattatcgctctttgttaaagacagctcttgttaaaatgcggatattgcaaattaatggaaaaaatatgacatagtaaaccatactcacttattaatatcttagtaaggaataattgatgaagttacttaaccttagagccctaattcagttaagttttaatgaaggacaagttgtagagatatcgagaacccagggcaggtgcctactgaagaagttccagaccaaggaagtataaagaaggacctgggtgggagcagtgagattggatatgagggccactggcaaagttttgccccagaacagtgtcaaaatgtttgcatttggcatagccctttctctttttgttctgaatggctttgctagaatatcttttctataatgaatttatcctgcttctcagatattgctaaagcactcccttttgaattttggtgctttaacatgcattttgatacattaccaaataaggtctgaatgacacaaattttagaactctccagagaaaagaaagatgctgagggaaaaagcataggtttgggactcactaaatcccagttcaattcctttctttaataaatatattcaattttacctgagaaagctctcgtgctctcgaattttatttagaaatttctctttgtacatgattgatttcacaatccttcttctgcctcctcttctactttcttctttctagattttcctatctttatgaagattattctgccttatcctcaacagttagaaacaatatttttgaaaatcactacggtatcctgcatagtgatttcccatgccaactttactaatttccattataaattattatttattgatgcctagagggcagatgagtgtagctgctatggagtgaggagacaaaacataagaaagttatgatcctaccctcaggtaatgattcagacatgataattaagtcaacaaattgatagaaactaatcactaactctctggctatagtcattctttcaatgaatagctcattactgagtatgcatgctacagtaacaaaattatataaggctgttgattaaatgttgattaagtgcatgtcttattcagagtttttttatatttgaaatggaagaggctggacttcagtaatttgctataaactgctagtatatgattatttgggggcagttattttttaaagaataatttaaatatggaatgtttagcagtttgttttttccctgggaaaaaccatactattattccctcccaatccctttgacaaagtgacagtcacattagttcagagatattgatgttttatacaggtgtagcctgtaagagatgaagcctggtatttatagaaattgacttattttattctcatatttacatgtgcataattttccatatgccagaaaagttgaatagtatcagattccaaatctgtatggagaccaaatcaagtgaatatctgttcctcctctctttattttagctggaccagaccaattttgaggaaaggatacagacagcgcctggaattgtcagacatataccaaatcccttctgttgattctgctgacaatctatctgaaaaattggaaaggtatgttcatgtacattgtttagttgaagagagaaattcatattattaattatttagagaagagaaagcaaacatattataagtttaattcttatatttaaaaataggagccaagtatggtggctaatgcctgtaatcccaactatttgggaggccaagatgagaggattgcttgagaccaggagtttgataccagcctgggcaacatagcaagatgttatctctacacaaaataaaaaagttagctgggaatggtagtgcatgcttgtattcccagctactcaggaggctgaagcaggagggttacttgagcccaggagtttgaggttgcagtgagctatgattgtgccactgcactccagcttgggtgacacagcaaaaccctctctctctaaaaaaaaaaaaaaaaaggaacatctcattttcacactgaaatgttgactgaaatcattaaacaataaaatcataaaagaaaaataatcagtttcctaagaaatgattttttttcctgaaaaatacacatttggtttcagagaatttgtcttattagagaccatgagatggattttgtgaaaactaaagtaacaccattatgaagtaaatcgtgtatatttgctttcaaaacctttatatttgaatacaaatgtactccctgggaagtcttaaggtaatggctactggttatcaaacaaatgtaaaaattgtatatttttgagtacctgttacatgccaggtagaatatctcctctcagccactctgagtggaaagcatcattatctctattttacagaaaagcaaactgaggctcagagagataatatactttgccagttaatgaatgatggagccatgattccagctgaggtctgtattgccttgctctctaggaatggtagtcccccccataaagaatctctcagtttcctttccaatcaaaaggttaggatccttttgattgccagtgacagaaacccaatttactagcttaagtaaataaaaggaacgaatttattggctcatgaagcctgaactatgtgaagacctaggtggagaactggccttaggaactcaatgggaccaaggactcaaatgccacctggtggcatttgccttatgctggttttattttctcagaccggaccagctttctacataaagtgggtccctggttagaactctttgctcctatctttaaggaccacgaaagaaggagccctttgtccttggctaaatgtgaaaaatcccagagactcttgagtcatagtgcttaccccttgggccactcatagtctagaatgaactaggctgagtctcgtgccaacagcacaggcctgatgccagataaaagggtgagtgaagggggataaaaaataagacatagctactaaattattgcaccaaagtaaaaacattgagttgacttgcaatttgtttcttttaattaaattcatttcctttttttggcattttgaaggcaaagtaagatattaaactttatttttattgattttattcaaagaattaagctagtgggagtagcagattcacacttctaagatcaagggccagcttctattattgaacacttggtgtgtgcaaatgccatgaggtagggatactttgttttgttttttattttttattgggttcgatctcttttgtttatgatgtatccccaagtgcctagaatagggcctggcatatggtatatactcaataaatatttgttgaatgaatccatgatggaatgtgaaatggctagcattacatagaaacctgtagcattgctggagagataaaatatataaacataatccattgcaggtatattgacaagttcaaaataatataatgggtattgaatatctaaatgtttgttgttgttgttgctgttgtttttgagacagagtcttgctctgttgcccaggctggagtgtaatggtgcaattttggctcactgcaaacttcgtctcctgggttcaagtgattctcctgcctcagcctctcgagtagctgggtttacaggcactcgccacaatgcctggctaatttttgtattttagtagatgtggagtttcgccatgttggccaggctggtcttgaactcctgacctcaagtgatctgcccaccttggcctcccaaaatgctgggattataggtgtgagccactatgcccagctttgaatatctaagttttaattggatgctgagggaatgattaatcagagtagggctgggttaattgaaaaatgtgatacatttgtatttatggccagatagagaacatgaatctgaatttgcagaattatctggcttaacatttttttctttccagttttcactgtatcccccatgttgattcaatttaaaaaatatacctattttacttcaattcaacaatgctatgccagtacaaacccatacgttctattatttttgttttgttttgtttttgtatctccaccctgttacttcttttcttataaaattggtatttgaaatttattgaaatattttggaagagtgacataccatttttggtactttgtacctctgcacccttgggaagtgaccctggcttcacatttcataactgccttgtgaccatggccctcaagtggttgccagatggttgaagaacattaacctatctggctcaattttgtgaccatggattgaatcctctacataactgcagtgtgcaaaccacacatccgttccaagattgtagtcaggatatgaactttttaagaataaaacttcttcccttctgatctgggcctggtatgtggtcctactagaaccacatcacctactcttggtgctaacaatttgtggcaccaagttgttcaagtttcacccattaaagaaattccccgaccttgccttctcctcaggtaactaccccattctattttttctttcatagctaacattctctgctctcctggtctctctacttcactttcatttacatctcagctcctgaagtatggtttccaccatgttcctaaaactacattgcccagggtcactagagacctcttatgaaatataacaacacctttctacattacttccgtgtggaccactttttcacattgaacccattttgttggtttatgtacacaccccttccttggctttcccatctgatccatttctcctttgatggagaaggtgagtctgctccatatttagcttcttactctgagtaaccaaatgttatggatgggaggttagctctgtgtgtgagagaaaggtggagaagcatgtggggagggaaatagatgggaaaaggtaattaggctttatagaagggctctcattagcaagcttctaggggatgccaagatccatgcttagagattgccaggcttgtcttcaaatctcagctgtgtattactcctttatgttttttgtttgtttgtgttgtttgtttttgagacagagtctcgctgtgtcacccaggctggagtgtagtggtgtgatctcagctcactgcaaactctgcctcctgggttcaagcgaatctcagtctcctgagtagctgggactacaggcatgcaccaccaggcctggctaatttttgtagagacggggttttgctatgctggccaggctggtcttgaactcctgacctcaagtgatctgcccgccttggcctcccaaagtgttgggattagtggcgtgagccactgccccggcctattactcctttagagtgatttagagccatgtttacttatggtaacttgacagtaatgggaataaccactgatgaaacgtaaagcctttgtctaattgtttacctagttcttccttgtggttcatgaaatttttcatctctgtacagtttgaaaattaagatgataatatttagagatattttattcctttgtgaagagaaaaaaggctttcattaacagaaatcagtggcaataacttaataaatacaatcagctggtgttcctatagtatttaaaagaaaacagaaagtttactagatttcagccagttttcagactatttaatgtctattcttactataatagaaaatatataatttgatcttgttctcatttttcaaagacctttaatacatgattttagtagttgaaaatgaagtttaatgatagtttatgcctctacttttaaaaacaaagtctaacagatttttctcatgttaaatcacagaaaaagccacctgacattttaacttgtttttgatttgacagtgaaatcttataaatctgccacagttctaaaccaataaagatcaaggtataagggaaaaatgtagaatgtttgtgtgtttattttttccaccttgttctaagcacagcaatgagcattcgtaaaagccttactttatttgtccacccttttcattgttttttagaagcccaacacttttctttaacacatacaatgtggccttttcatgaaatcaattccctgcacagtgatatatggcagagcattgaattctgccaaatatctggctgagtgtttggtgttgtatggtctccatgagattttgtctctataatacttgggttaatctccttggatatacttgtgtgaatcaaactatgttaagggaaataggacaactaaaatatttgcacatgcaacttattggtcccactttttattcttttgcagagaatgggatagagagctggcttcaaagaaaaatcctaaactcattaatgcccttcggcgatgttttttctggagatttatgttctatggaatctttttatatttaggggtaaggatctcatttgtacattcattatgtatcacataactatattcatttttgtgattatgaaaagactacgaaatctggtgaataggtgtaaaaatataaaggatgaatccaactccaaacactaagaaaccacctaaaactctagtaaggataagtaaaaatcctttggaactaaaatgtcctggaacacgggtggcaatttacaatctcaatgggctcagcaaaataaattgcttgcttaaaaaattattttctgttatgattccaaatcacattatcttactagtacatgagattactggtgcctttattttgctgtattcaacaggagagtgtcaggagacaatgtcagcagaattaggtcaaatgcagctaattacatatatgaatgtttgtaatattttgaaatcatatctgcatggtgaattgtttcaaagaaaaacactaaaaatttaaagtatagcagctttaaatactaaataaataatactaaaaatttaaagttctcttgcaatatattttcttaatatcttacatctcatcagtgtgaaaagttgcacacctgaaaatccaggctttgtggtgtttaagtgccttgtatgttccccagttgctgtccaatgtgactctgatttattattttctacatcatgaaagcattatttgaatccttggttgtaacctataaaaggagacagattcaagacttgtttaatcttcttgttaaagctgtgcacaatatttgctttggggcgtttacttatcatatggattgacttgtgtttatattggtctttatgcctcagggagttaaacagtgtctcccagagaaatgccatttgtgttacattgcttgaaaaatttcagttcatacacccccatgaaaaatacatttaaaacttatcttaacaaagatgagtacacttaggcccagaatgttctctaatgctcttgataatttcctagaagaaatttttctgacttttgaaataatagatccataatatatattcttatggaaatctgaaaccatttgggcatttgggggtaaaaagtattttattagtaaatttaaatgaggtagctggataattaaattacttttaagttacctttgagatgatttttctcaatcagagcaccacccagagctttgagaaacaattttattcacagcttctgattctatttgatgtaatttttagaaaataagttttgctggttgctttgaatcagggtatggagtacagttcactctgatcctatcatataaatcatgtaagtatataacattttcaataagtgattgttggattgaagtgaatgatatttcaagtaattgttatgtcatggccaagatttcagtgaaactcaaaatttctcctggttgtgttctccattgcatgctgcttctattgattaacctaagcactactgagtagaagctggaagaggggtctaattagaaggcccctttctatgctctgcttggcttgtaaaataatttatttctctagatcccaccaacatagtagtttcatgtatgcaaaaacacccacctaaatgtcaaagtttgtatgatacatggacatatctatagaattttttttggtctggtgcatgccaaaaaataaacatgatatagaagaatttaatatttattgagtacctaatctgttccagttcaatatgaaggtctttatgcagattattttacttaattttcctagtaactccatggagcaaaaattatctctaatttatataacaggaagttgagcgtgaggcaaattaagtaactttcccaaagttacacatatggtaagtttgagagatatcccagtctctttagctccaaagcctttgaccctttcaccataccagattatgattgctattaatatataattataattataatgattgtatttaggtactcaacagaatggtgactctagtaaccagccttggttctgctgagcttctctgcgtcttctcaggagacacaggctacagagcttgaaggctgaggattcttccagggtcacttcaggggcaaatctgaaactttcttcaggacaggaatcaacgagatcttctcacttacttatacctgggggaggaactgtatgaaatccacccaagaaccagtcatgctaagggccaaacctatagacaaaaaaagggataggagaatggagtatgtatggagaaagactaaattgttcttaaacttctcaagcttaaaaatatcccagcaaaagagatcgtaaaagcccttcatggcgtattaattatccatgcatgggggtgagtggaaaggtactcctgagcccgaggctacagctttggaactagcagcacctttgaaggggaaagcgtgtttccatcatctcaactcctactgataaccaatggaatattggtgagtaaaggatcctgggggaagaagcagctgaaatgtgtaggtgagaaggcagagagaagaatatttatattgggaatggcacaagtgtgatgaggctgcaggtttttcacccttgtcatagagaaaaaaccacgctgacaccatgcagttttaaatagtgagaaatttgcaaattgttagatcttaaataatttagataaacatagtggccatttagattattgcagttttttcaggatatctgatctcttgatttcattctttttgtctcttataagaataaaagggggggagaaaatttagccattatagtatttctctacattttctctgtccttttacataacttacaccagtgccttcctatttatggtattatttatgggtatttcttcttttctttcactgagcaaggataaatgagccagggattcttgaaactactgtaacacttctcttagaaatagatggtcatactttcagaatctctacacattcttagtccctctaaacaatgatagttgtggcataaaaatatttgcttggtttcaggactgatagagaaaagtactataaaatttgctgttaactgtgaaaggttaaaaaaaaggaggtgccatcatgaaggagctaatctttctgaagtactgctgtagttttaaatattattagctatgacttctcaccattaactatgcacttgctttttcttcatctgactcagcagccagatagatgcaacattgtctttaacatttaagactcctagcaagtccgggcacgggggctcacacctgtaatcccagcactttgggaggccgaggtgggcaaatcacaaggtcaggagtttgagaccagcctggccaatatggtgaaaccctgtctctactaaaagtacaaaaatcagccaggtgtggtggcgtggtggcgggcacctgtggtcccagctacttgggaggctgaggcaggagaatagcttgaacctgggaggcagaggttgcagtgagctgagatcgcaccactgcactccagcctgggtgacagagcgagactccatctcaaaaaaaaaaaaaaaaaaaaagactcctagcatggaagagaaactggctgttgaaaacctgaatgtgagagtcagtcaaggatagtttgagggaagccaagtagaggaagctctcacaagcagattggtgagagaatatgattatacaatgcatttattatgataagaaattcacaagcattcattcaaaatactcttgattcctaggcagctctgggcatatttccaccaacaaattgaggcatatgtcagtgcagcctaggtcagactaccttttttcattaaacctcacaaaattaaaggacatacaggagaagtcctggtactcatgttgcagactacagtctatatggcaaaggaggatctctgtcccttatgtttggatgaaaacattgggtaggcatttgaatacaagcctactgctaatatggggctaaggtctttggccccctaaaggtttgctgaaatattactgacaggaggcagattgataagaggaaaagcacataaatgtatttgacatgtatacatgggagccttcaggatgaagacctaccctctcagtgcagtatggaagcttgtataccatcttgaggttacagaaagaatgggggtttggatctttgtaaaacaggtttcagtggcaagacaggttatgagaaggagaaaggaagagacttgggtagcaaagggggtcttgttttgtaggtaaatcgttggcagcccacagagaaaatagatggagaatgtttcttttcagaccttggcaggtgtcagattctcagttaatctctcctagatttgaaaaaaaaaaaaaaggtctagaaagggagagcctggctgcactaacacattttctacagatgcaaatttctcccacaaaatacagctttgcaggtccacttctatctgctgggcctgtggcaaccatttcaaaatatgtgaatgaaatatatgtgggggtaaactatttttatttacttccctaaagaagggatggtgttctctcgggaattctgtgcatagagagcctgtggcttaggcactttgatttatgtatatctcttcctgtgattggctatctagggactgctatctccagcaaatcttctaaatgtctgccatgtagaattcctttctcatctttctgtctcacccccttatctagctgcttctctaaccctagagtgacactgcactccccacaatctcctatgtcctgaatattttaccccatcctaaactccatctctaacacagatgcactttcttgtgctgcctactgcattgtacatcttccccttagttcccatgatgcaactctgccctaccccagaaaatgtaatttaattggtctgggataaaacctgggacactatcattcttgaaatattccccaagcgattctaattatatagccaaagttgagaactatttgtagacaggcatcagcatgatcacttaatgatttgacttttgctagatctaaggtgaggaaattggagagtggtatccataggaagaactgtttagtttaattttttttttattttttcttctaaaaaaaaatccaacaacgagatacatgtgcggaacatgcaggtttgttacataggtataatgtgccatggtagtttgttgcacctattgacccatcctctaagttccctcccctactccttacttcccaacaggccctggtgtatgttgttcccctctctgggtccacctgttctcaatgttcaactcccttttacgagtgagaacacatggtgtttgattttctgttcctgtgttaatttgctgaggatgatagtttccagcttcatccacgtccctgcaaaggacatgatctcattcctttttatggctgcatagtattccatgatgtatatgtaccacattttctttatccagtctgtcattgatgggcatttgggttggttccatgtctttgctattgtaaatagttctgcagtaaacatatatgtccatgtgtctttatagtagaatgatttatattactttgggtatatacccagtaatgagattgctgggtcaaatggcatttctggttctagatacttgaggaatcgccacactgtcttccacaatggttgaactaatttacactcccactaacagtgtaaaagcgttcctatttctccacagcctcaccagcatctattgtttcctaacattttaataactgctattctgactggcatgagatggtatctcattgtggttttgatttgcatttatctgatgatcagtgatgctgagatttttaaaatatgtttgttggccatgtaaatgtcttttgtgaagtgtctgttcatatcctttgcccaccttaatagggttttttttttcttgtgaatttgtttaagtgccttgtaaattctggaaattagatctttgtcagatggatagattgcaaaaattttctcccattttgtaggttgcctgttcactctgatgataggttcttttgctgtgcagaagctctttagtttaattagatccaatttgtcaattttggctttttttgcaattgcttttggcattttcctcgtgaagtctttgcccgtgcctatgtcctgaatggtattgcgtaggttttcttctagggtttttatagttttgggttttacatttaagtctttaatacatcttgagttaatttttgtataaggtataaggaaggggtccagtttcagttttatgcataatggctaggcagttttcccaccaccatttactgaataggagatcttttcctcattgcttgtttttgtcagatttgtcgaagatcagatggttgtagatgtgtggtgttatttctgaggtctctgttctgcaccattggtctatatgtctgttatcgtaccagtcccatgctgttttggttaccgtagccttgtagtatattttgaagtctggtagcgtgatgcctccagctttgttctttttgcttaggattgtcttggctatatggagtcttctttgattccatatgaaatttaaaataatttttttttattctgtgaagaatgtcaatggtagtttgatgggaatagcattgaaattataaattactttgggcagtatagccatgttcacaatattgattctttctatccgtaaggacgacactttttccatttgtttgtgttctctcttatttccttgagcagtggtttgtagttctccttaaagaggtctttcacatcctttgttagctgtgttcctaggtattttgttctctttgtagtgattgtgaatgggaattcattcttgatttgcctctctgctgcctgttgttggtgtaaacaaaattcatttcttgttcttatttgtgaaattttggaaccaaatctattttcaaattagaaattgcttgtgataatggttttgcaacttagactggatatgagacgatgagatattagttctttcattcctttgtaggaatatggtgcatcttgcattattttagctaactagtgtcctttaatgactaatgaatatgacatggtgaaacaaagtaaaatatatatgatgcactaagtatgcattgtttccaaaggttcagcattttttttttgttaactctgctgggatctgctttatgcactgataacataacttattttatgatcttaagcaaataaaaacacttatctggacctcagtttccttaactgtacaactgagggaaactgtatagtatagctatagtacagtataccatctttaccgtcacttccatcttttaaattatgtgtatataagatagggcctagataaatggtatttatcttaaattacagtgatactagcttataacttaatttgctaggtcatgttgaactgataacaatgtgtgaactgatgagcaactgagaagtaaccaggttgtgttataacagtttgtttttgatttagggttatcagtgagggtggcggtggggaggggactttggagtctaactgtctagttcaaatattagtttttgtttatttttatttttaatttttgtgggtacatagtagatgtatatatttatggggtacatgtgatgttttcatataggcatgcaatgtgaaataagcacatcatagagaatggggtatccatcccctcaaacacttatcttttgagttaccaacaatccaatgacactctttaagttatcaaatcacagttttgccagctactagccatgtgattttgggtaggttacttaaattctcttcatctcaatttcattattgtaaagtggagataatgatagcacattttttctttttcttttttcttttattttttattattatactttaagttgtgtgatacatgtgcagaatgtgcaggtttgttacataggtatcaacaactctataaaacatgttctatccaggaaaagaaactatcatcagagtgaacaggcaacttacggaatgggagaaaatgtttgcaatctagatggcgattgcaatggcggttcgctgcatccatcagcccatcatctacattaggtatttctcctaatgctatccctccccttgctccccaccccctcacaggcccctgtgtgtgatgttcccctccctgtgtccatgtgttctcattgttcaactcccacttatgagtgagaacatgtggtgtttggttttctgttcttgtgttagtttgctgagaatgatggtttccagcttcatccatgttcctgcaaggacatgaactcatccttttttatggctgtatagtattccatggtatatatgtgccacattttctttatccagtctatcattggtggacatttgggttggttccaagtctttgctattgtgaacgctgcagcaatgaacatacataagcatatgtctttctagtcaaataagttataatcctttgggtatgtacccagtaatgggattgctgggtcaaatggtatttctggttctagattcttgaggaatcgccacactgtcttccacaatggttgaattaatttacactcccaccaacagtgtagaagcattcctatttctccacatccgctccagcatctgttgtttcctgactttttaatgatcaccattctaactggtgtgagatggtatctcattgtggttttgatttgcatttctctaatgactagtgatgatgagcttcttttcatgtttgttggctgcataaatgtcttcttttgagaagtgtctgttcatatcctttccccactttttgatggggttgtttttttcctgtaaatttgtttaagttccttgtagattttggatattagccctttgtcaggtggatagattgcaaacattttctcccattctgtaagttgcctgttcactctgatgatagtttcttttgctggatagaacatgttttatagagttgttgtgagaattaaatgcattaagcacatagaatagattctggtacatagcaagtgctctctctatatatggaactctatatgtagttggtgcaaaagtaattgtggttttcaccattgaaagtaatggcaaagaccatcattaccttttcaccaatttaaatatatggaaggaatatatatataaaacctatatatatatgtcacatatatgtctctaacccattattataatatataatacaatatatattataattataattgtatataacatatgttatataataatatagtaatatttattctaaataaatatataatactataaataatataataatttatatatatgattataatatataataggctatattatatattattaacatatacatatgtgtatatatatgtctttcatagacttaaatatatagagcaataataggttagaaaatagcaaacatgtatatataaacatatatacatatagaaaacatatataaaaacatatatatatatatatatatgtgtgttttctgcctttcatttttagagacagggtctcatcatgttgcccaggctggtctcaaactcctgggctcaagtgatcctactgctttggactcccgaagtgctgggatttcagacatgagacactgcacccagtccagtccctgtctttttaaatagactctctacctaagtgcacaaatactcattatttacatttagttatttctgtatatatgctataagcaaatcttgtagcaccagtttgatttttataaggcacaagaatatattttactaatgctttaaaatggcagctagattctagtattactttagaaattaaaattaatattttaacacatctttcattattgtgttatctgaaccaaacctattattgctgctatttcagcaaatccaggggctttttcttataaaatatgaagaatatagcttagatttctagtgaagatgttaccagtaataattaataaaatcagtaagcactaaaaggaaaataccaaaactaaagcattttgaattagtcattgaatctaaaagaaaggtagatttttttctgagattctgttctaggtgtggtatatgtgtatttttgcaaaaactataaacaattgtggcaaaatgaaggaaatatttaaaaacaaacctcttaattcttcagtggattaagcgtgaatatgtttttattttctatgatgaatatggaaaaattcatttccttagcaatttgtatgagcccaaaaactattgtcagactctgctgtatcaaaatagacaaaaaattgacactcacttttaccctgccaaaagcaaaatcttaaacttttgctttagtatataagccagcattcattgtatcctatgatgggttctgagtgtaggtgtatttgctttcttccattttttgtatgcatgttttctttttatttattattgtaagttgtatgaaatttttatccaaatttttattttcttctgattaataatcagaataatcagataattactggtaaatttgatgttaatccttccagctttttcccatgggaatttatacttaataaaggggagaagtcatcattacataatgtgcatattaatctgcttctccctttaatgtgttgtgaatgcctttccatgtcattagatgtttttctacctagttactttcatgaatcatatggctgtaccatgatttatttaatcagttcctcatcattgagtatgtaaattgcctccatttttttattactataaaaggtccttcagtacacacccctttaaaagctgactcttagaaggtgttcttgactctctacctaagtgtaaaaatacaaataaattgctttccagaaaaggtgcactactattttactttcctgatactaaactatgaaaattcagtcctaacaatagatatttaaataaagttttaaaaatgccaagtgaaaaagagcatattattattttcatttgcattacttttggttcctggtgagtttaatctgtttttgtatattaattatgcatttatatttctttttgtgtgtgtgaattgcctttcatgttctttgtgtgtttttattttgttgtatttgtctctttcttgatatatgagagaatattttccctagcctgtcaattgccttgtaattttgtttctagtgagtttttttttttttttttacaattaaaagctttaatttttgaaaattttgctggcaaatctatatatctttttctttgttttctgctttgacattattcttttataaaggcccatgccacccaaatattatgtaagcatgcatctatgtttttattacttcatcttttacatttaaatatctactctatttagaattcattgtgatgcatgtatgaggtagaaatctaatttcaaaaagatgagtatccagtttgtccatcatttattgcatgatctctttctccactgaattaaaatgccgtattttataatatattaaagtattacatgtgcttggacatgttcctggacttttgagataaatcagtctatttctttgtcatgtcacatattattatggctttatgatttaatatccagtaatgtaaaccctctgacacattattcttattcctcaaatgtttttgatgagttttcttccaaatgaaatttataatcattttattcattgattcaacaaatatttgttgaatggatattctgtgcttggtattgtgcatggtattaggattgttgcaaaaattgagactgacagtccctactcttacggtgctaaaaattcacttccaaaaaaatctttaaatgttgatgaagattgcactaatcttataaaataacttggaggggaatgtaatctttgcaacattaagttcttcattttagaaagttttaagactctccatttatttgagacttttaaaatatgtcccaataatgttttgtgagatgtatattttaagatatatatcttattgctattacattgtatcttttgttatattgttactatgaatgggatactcatttaattagatgtcatttttggtatatagaaatctattttcttagcatagtcattttttaaacctcgatctattaaattcttgattcatttacatttgttacacaatcatattctatgctgataatacttcttgcttctttccaatatttgtacctcgatcatttttcttgttgagttgtattagctagaagttctagaaaaatgttaaatggtagtaatagctagtattctgttttttcctgactctaaatgtaatgcatctagacttttataattatggcattgattgtaacattttgaggaagaaatcctttttcaggttaataatgtatctttatattcaagtttattaagaacatttattggaaacatattgaaattttatcagattccttttcagttgttactgagataatcataggttcttctgtattcttttaattaatttctcaaaattaaactgtcctattattcttggaataacgacatataaagtactgtatatttaaaagaagttaaaatgataatggtgattttattaagtgacctcacacaatagaaaacagtgtagccttagaagttttccaagtgaccattctacttagaaacaaccctgctttgggatcagaactgtaatttttaaagtaaagttttctgggtttaattcatttagtgtaattacaagcatgagttcaggtttctatttttttcacctgaactttccttcatggtttgaatatctagaaaaagcagactttcctatctctagactaaacatttgatcctatcttaggtatgcattacaattttttaaccataaatggttaaagaatttagactcatctacaataactttgaagctctggtcttgaagaacatgtgagaaatgagatataactcctagaagatataggagacatttttagtcttccaaattttccctgggaggctgatctaaattgagtcacaaaattgttcccaccaggaatgcaatcacttgagctgttttctaatctgagcccctctacccagatgatcttctgaactcatactgttcagactttcatccttctgagtagaaaacagccatagtcatggcaggatgagggctaggacaattacccaaggaattcttggcctctgccatgggactctgcagactcagatcatataatcagagatgttagcactggaggggacatcacaattagctttctccacctcttagtttatcagtgaggaaaactgtccagagcgcggaagagactaaaataacacagccaatgtaggtaatgtgctggataagaatttggaattcacgattttgaattcagtgtttatttcaccatcacgctggcttacacgttggtatcaggcttcttctattattgaagtgagccattaagtgaattccatcttgatttgtgtctgatacagagtaataaactattttattaaatatccaaataattatacattcctccttcttacatgcaagcctaagtttgcttgtactatttcatgtggtagcaaatcaggacgcttcttgtgtctctgaaaatactctgagtaatggagtacagtcagctttcttgtaccaagaatatagggactatgtttctcccagtcattctggggataatttttgtgaaggattgcacttcataggttaagctaggtatcagttaccagtgttttttccaaataaaaaaaaaatcaggtgatatctgtaaatggttccattgtaaatattaaagaacatgatgcttaaaacagattagggaaaactatagaaggggtggggtttcggagtgctaattttgtccttgaatggtaacagctccatgtggtggtgaggtttatgttggtttgctgtttgcagatgatcttattattagaatttttcataccgaaaataaactgcattttagtttgtaaacatgcccttccagagtaatgctaccagttctttgtgaaatagctactgttgttcaaaggatgactatgtcctcttcggttgaggaaagatgacaacaaactcagtaatgacatgtaaaataggtattacaaaccaggtatggtggcatgagcctgtaatcccagctacttgagaggctaaagcaggaggatctgttgatctatggatttgaggctgtagtgtgttgtgatggcacctatgaatagcccttgcactccagcccaagcaacaaagcaagactgtctctgaatttttgttttgttttgttttttgtttttttttttttgagacagagtcttgctctgtcacccaggctgaagtgcagtggcgcgatctccactcactgcaagctccgcctcctgggttcacgccattctcctgcctcagcctcccgagtagctaggactacaggcgcccgcctccacgcccagctaaattttttgtatttttagtagagacgaggtttcactgtgttagccaggacggtcttgatctcctgaccttgtgatcctcctgcctcggcctcccaaagtgctgggattacaggcgtgagccaccgcgcccggcccctgtctctgaattttttaaaaaggcattccactcaaattaatacacattttaattgtgttttgttgtaaattacaactgaataaaaattcagcaaataagtctgttgtggtagggaaaagtctattgtgatctggaaaatataatggagaaatccagtggaagagattttatttcacattactcaaaataaaaaaatcttatacaagtctttacacttgtaacttgaaaaattctgtgctaaaatttagcttggttgctaaaatatttctctttttttctcagaagcttctttttagcatcctatagacacaagttactttttaaaatatttgcatacttgctttgcaatgtattgtttatcagtagttctatattctttgagatagtctatccagtctttctgtatttatcgtatgtctgtatagatatatattagcagataaatgagttctgaaaggggagaaatgtgattatgctaatcatgatataaagaattgactttataagcagtgttcacaggtcatacctttcccgttactgtcttacagtgaacaagaaatgatgctttgtctggtatgcatggtaaataatgccccttgctctctgcttcatgatcacatgtgatacttctaacatagatagcacatgtaaatccagtggccttgactgcaactcaagagagcattttggccaagtacaaacccactagtcatgaaaaaaaaaaaaaaaccaaatcaaagtaaattgatggtattgacatttgtctatgaaaaacaacataatatagaacaattctggggtaaaatattgatctaaaataattttaaggattaaatattgccattgtaagcatactatgagcaattatgtttgtaatgcagatatatttataattttaaatccaagatttaccttaattgtacattttcctaatttaaaaaagttattttgaaaaaaaaatcctcgaatctagagaaaggttggcaaatacatatggaactttgtaaaaaacatccagggcagcactttcactgattgcagtagcttaggagtgaaaaacaacacaactgctccaatgtatggcaatgggcaaatatcccgatttattcacagggtggcatgttaggcagtgcttagaataaatgagttggttatacaagtatcaatagggataaatgtgaaaaacacagtgttaagtttttaaaaagttgtaaaaagcacagtaggatgttatttatataaaatttaaaaacctcaaaaaccattcttctttgatatatattctaaagatgaacatatatgtaatagaagtacaaaacatacataaaataatatacactatgcagtcatttgtgtacttacttttcaaaaatatttcagtagatatagcaaacagttaacatgtaatatttggataggaggttggcaattttctttttagcacctgcctgtctgctatcattcaaactcacatttaaaatgtggctatgtgagatgagagaactataatattccaggtttgtgattagtttggaaactttttaaaagtttgaatgtggtctgagagatagtttgttataatttctgttcttttacatttgctgaggagagctttacttccaactatgtggtcaattttggaataggtgtggtgtggtgctgaaaaaaatgtatattctgttgatttggggtggagagttctgtagatgtctattaggtctgcttggtgcagagctgagttcaattcctgggtatccttgttgactttctgtctcgttgatctgtctaatgttgacagtggggtgttaaagtctcccattattaatgtgtgggagtctaagtctctttgtaggtcactcaggacttgctttatgaatctgggtgctcctgtattgggtgcataaatatttaggatagttagctcctcttgttgaattgatccctttaccattatgtaatggccttctttgtctcttttgatctttgttggtttaaagtctgttttatcagagactaggattgcaacccctgcctttttttgttttccattggcttggtagatcttcctccatccttttattttgagcctatgtgtgtctctgcacgtgagatgggtttcctgaatacagcacactgatgggtcttgactctttatccaatttgccagtctgtgtcttttaattggagcatttagtccatttatatttaaagttaatattgttatgtgtgaatttgatcctgtcattatgatgttagctggtgattttgctcattagttgatgcagtttcttcctagtctcgatggtctttacattttggcatgattttgcagtggctggtactggttgttcctttccaggtttagcgcttccttcaggagctcttttagggcaggcctggtggtgacaaaatctctcagcatttgcttgtctataaagtattttatttctccttcacttatgaagcttagtttggctggatatctctcagaccacagtgcaatcaaactagaactcaggattaagaatctcactcaaagccgctcaactacatggaaactgaacaacctgctcctgaatgactactgggtacataacgaaatgaagacagaaataaagatgttctttgaaaccaacgagaacaaagacaccacataccagaatctctgggatgcattcaaagcagtgtgtagagggaaatttatagcactaaatgcctacaagagaaagcaggaaagatccaaaattgacaccctaacatcacaattaaaagaactagaaaagcaagagcaaacacattcaaaagctagcagaaggcaagaaataactaaaatcagagcagaactgaaggaaatagagacacaaaaaacccttcaaaaaatcaatgaatccaggagctggttttttgaaaggatcaacaaaattgatagaccgctagcaagactaataaagaaaaaaagagagaagaatcaaatagacacaataaaaaatgataaaggggatatcaccaccaatcccacagaaatacaaactaccatcagagaatactacaaacacctctacgcaaataaactagaaaatctagaagaaatggatacattcctcgacacatacactctcccaagactaaaccaggaagaagttgaatctctgaatagaccaataacaggctctgaaattgtggcaataatcaatagtttaccaaccaaaaagagtccaggaccagatggattcacagccgaattctaccagaggtacaaggaggaactggtaccattccttctgaaactattccaatcaatagaaaaagagggaatcctccctaactcattttatgaggccagcatcattctgataccaaagccgggcagagacacaaccaaaaaagagaattttagaccaatatccttgatgaacattgatgcaaaaatcctcaataaaatactggcaaaccgaatccagcagcacatcaaaaagcttatccaccatgatcaagtgggcttcatccctgggatgcaaggctggttcaatatacgcaaatcaataaatgtaatccagcatataaacagagccaaagacaaaaaccacatgattatctcaatagatgcagaaaaagcctttgacaaaattcaacaacccttcatgctaaaaactctcaataaattaggtattgatgggacgtatttcaaaataataagagctatctatgacaaacccacagccaatatcatactgaatgggcaaaaactggaagcattccctttgaaaactggcacaagacagggatgccctctctcaccgctcctattcaacatagtgttggaagttctggccagggcaatcaggcaggagaaggaaataaagggtattcaattaggaaaagaggaagtcaaattgtccctgtttgcagacgacatgattgtttatctagaaaaccccatcgtctcagcccaaaatctccttaagctgataagcaacttcagcaaagtctcaggatacaaaatcaatgtacaaaaatcacaagcattcttatacaccaacaacagacaaacagagagccaaatcatgagtgaactcccattcacaattgcttcaaagagaataaaatacctaggaatccaacttacaagggatgtgaaggacctcttcaaggagaactacaaaccactgctcaaggaaataaaagaggacacaaacaaatggaagaacattccatgctcatgggtaggaagaatcaatatcgtgaaaatggccatactgcccaaggtaatttacagattcaatgccatccccatcaagctaccaatgactttcttcatagaattggaaaaaactactttaaagttcatatggaaccaaaaaagagcccgcatcgccaagtcaatcgtaagccaaaagaacaaagctggaggcatcacgctacctgacttcaaactatactacaaggctacagtaaccaaaacagcatggtactggtaccaaaacagagatatagatcaatggaacagaacagagccctcagaaataacgccgcatatctacaactatctgatctttgacaaacctgagaaaaacaagcaatggggaaaggattccctatttaataaatggtgctgggaaaactggctagccatatgtagaaagctgaaactggatcccttccttacaccttatacaaaaatcaattcaagatggattaaagatttaaacgttagacctaaaaccataaaaaccctagaagaaaacctaggtattaccattcaggacataggcgtgggcaaggacttcatgtccaaaacaccaaaagcaatggcaacaaaagccaaaattgacaaatgggatctaattaaactaaagagcttctgcaaagcaaaagaaactaccatcagagtgaacaggcaacctacaacatgggagaaaattttcgcaacctactcatctgacaaagggctaatatccagaatctacaatgaactcaaacaaatttacaagaaaaaaacaaacaaccccatcaaaaagtgggcgaaggacatgaacagacactactcaaaagaagacatttatgcagccaaaaaacacatgaagaaatgctcatcatcactggccatcagagaaatgcaaatcaaaaccactatgagatatcatctcacaccagttagaatggcaatcattaaaaagtcaggaaacaacaggtgctggagaggatgtggagaaataggaacacttttacactgttggtgggactgtaaactagttcaaccattgtggaagtcagtgtggcgattcctcagggatctagaactagaaataccatttgacccagccatcccattactgggtatatacccaaaggactataaatcatgctgctataaagacacatgcacacgtatgtttattgcggcactattcacaataggaaagacttggaaccaacccaaatgtccaacaatgatagactggattaagaaaatgtggcacatatacaccatggaatactatacagccataaaaaatgatgagttcatgtcctttgtagagacatggatgaaattggaaaccatcattctcagtaaactatcgcaagaacaaaaaaccaaacaccgcatattctcactcataggtgggaattgaacaatgagatcacatggacacaggaaggggaatatcacactctggggactgtggtggggtcgggggaggggggagggatagcattgggagatatacctaatgctagatgacacgttagtgggtgcagcgcaccagcatggcacatgtatacatatgtaactaacctgcacaatgtgcacatgtaccctaaaacttagagtataaaaaaaaaaaaaaaaaaagtttgaatgttttcttgcattcagagccttggttgacatagttaattaaaaataaaacattgtatataaagcacagaatgagcagctacacaaagctgctcaatcaatgacagctctatatgggttagggtttcttgtggggatgacattgatgtagaaagcatggtcatctattgagaatgatggggctggaggtattggatacttgaggtttagaaaatacattgtagaaaatggacaaaaacccctcaaattaagggatgaggcagaataatgcttggcaataccaggggtaggctgcagtctttcttggaaatatatattttaaatggaaccaattatcatagcatcatttcctctcagggttaccctctgatccctattttactaaatcgttataaaacaaaatgaggaattatgtgtccttcccttttgaagccaatgtaacaagatgggtaagaattagacctcctgagttcaaaatccctggattcagatctattcctgtatattcaggagaagtggtaataaattcgatggacaatttggtttagtagtcgattgaggaccctgatgaggtatatttgggaaaacataacttccgctctctctcattgactcacgggcctttgaggagtccaggagtcattggaatctggcctgaggttgaggctgctggcaaaactccttccccaaagtccattcctattgctgactgagaagggactagcattggaagtggctgattttaaataccgctagtgctggtgtgctcctccctcccattcccagctctgctttgtgtagttgccttgagaagctaagttcattctgaaaataatgccattgcacaaaacacttttgaaagttctagtttgaaattacatcaggtcacttggtctgtgtggcctcagtttcttcatctgccatgtgaaaataataatgcctactctgtagcaaagaaagtctctatagtaaacaaaaaaaaagcctactctgatactgaaagttgttatgaaaaataaaaaagggaaatgctttagaaactgttaagtgctatgtagatgttactaattaacaaaccatttcagaaactatactttttattttatggccactattcactgtttaacttaaaatacctcatatgtaaacttgtctcccactgttgctataacaaatcccaagtcttatttcaaagtaccaagatattgaaaatagtgctaagagtttcacatatggtatgaccctctatataaactcattttaagtctcctctaaagatgaaaagtcttgtgttgaaattctcagggtattttatgagaaataaatgaaatttaatttctctgtttttccccttttgtaggaagtcaccaaagcagtacagcctctcttactgggaagaatcatagcttcctatgacccggataacaaggaggaacgctctatcgcgatttatctaggcataggcttatgccttctctttattgtgaggacactgctcctacacccagccatttttggccttcatcacattggaatgcagatgagaatagctatgtttagtttgatttataagaaggtaatacttccttgcacaggccccatggcacatatattctgtatcgtacatgttttaatgtcataaattaggtagtgagctggtacaagtaagggataaatgctgaaattaatttaatatgcctattaaataaatggcaggaataattaatgctcttaattatccttgataatttaattgacttaaactgataattattgagtatcttctgtaaactgcctctgttgtagttttttttttctcctaatcatgttatcatttttttggaatccatggtttcctgttaagatgactcacacagcctacataaaagtaattgacaaaatatcatcttatagtaaaatgccacatatctttatgttcagcaagaagagtataatatatgattgttaatgataacccaaacaacaaaagatttcaccttaactggttgtcataagtagtagtatccaccgccttattttgagttggatttttatcatcctatgagccctacaaatttaaagtttttggaacagcacgtgcattgaacccataagaacctactctgcttttctgcatgtattgtccagacaagagaccaaattgccgaggcatcatttaggtgaattctaattaacatttagctaccttacaaccacaattcaaggttgtttcaaaggcatgtgcttgcatcatcctgattcactaccatgtgttactaacttggatctgcaaagtcattataaaaagctgttttgatggacttatttggatattgctttacccttcttctctcttttcttttatcaatgtaaaaacattatatgttaaatacttggcttttaagagcatagatctgaaatctgcctctagcaaataacccataacacttctaagatatacctgcaaggtcaattgtgttgtaaaaccttgataaccatactttattgttcaaaaaagccttttatgaaggcagaagttaaaaaaaaaaaacaaaaaaaacagagtccacagttatcacctcagctacaatctcatcagttcacaagtaccagcaaaacatgtgataagtcaacaaatgttttatttcaatctgaacattttacgtaagtgaagactttgttagatatcatttggaatgtggaatctacacagttggcatatcagagaaggttgaattcagtttaataaatgtttatagaaagtgcttgttatcataatgataatagctcaggatgtgcatgacaagcttttaagcgattgggtacactatctcatttgatcttctgcacaactattaatggtaggtactattatccctatcttatggataagtaaactaagatttaaaaagtacagaacatggtgtgaacactgcttcaaaatttctaaaataggtaaatcacgatctctaaactggagggttgtccaaccactagggacaatagagtactgatatttagtggtcagactgtaatgcgggaagagacaggcatgggctaaacgggtgtagagatcaaataaggggcaggttagtttgtaaacatgtccatatgtaacatttagcacaaatacaggatataggtgctttcagacccagctgcattgataaaaagttaggtggtattgtatctgtcttcctttctcaatgttgcatatctgtgttcttgcccagtttgcttcatctctctagccacacttattggcctacaatggcatcatcaccaaagaaggcaatcccatctccgtgtggctttggtttgctccctaaagtaaaccttgtgtttacttttcccaggtctcatgctttcccatatctgacctgttttgtcctcatggccaggatatgtgggacctttcctacaatgttccaaagtttgtaatagagctcttctctgctttgttccaaattctgcaacattttactttaaataatgaatttaaatacaaacaaacttgagctttgcctatacttttcaagaatgcagagataactaaattaataaaaatattcattgagtccttactgtgcacacagctctatgttaagccttgtgcagaactcaaagtcactcgagattaagcctgttactaagttatgtgcaatttagctcagtggatttcccccacttcatattgctctgataatgttttggaattaactgccttgattccttcttttctctgcttgtctatacactatttattattctacaccatctcaaattctaactcctcaagaaaatccttccagatgatttttctaaccaggagttttaacttccttttaactaccctattactttctacttccttaactcatctatcatattatatttagttatttatatactaggtcgccttgaagaagggattgtgttttcataaatcttaataatccctgaggcatcaagtacagtgatttgcatttactaaatgctcaacaaatatgtgagggattcacttgaaactaatattagataattcccagtcaaagtgatctaatagcaaatcaattcttcagttttataggcaaagtatgactctggttttccataatcataattaatttgtcaactttataattttaattaagtaaatttaattggtagataaataagtagataaaaaataatttacctgcttaactacgtttcatatagcattgcatttttctttgtaaaatttaagaattttgtattaataaacttttttacaaaagtattaattattcagttattcatcatatacttttattgacttaaaagtaattttattcaaaagagttagtataggactacatgaaaaattcaaggccaaggcttaatttcaaatttcactgcctttggctctatcttttaaaacaaaacaaaaaactcccgcacaatatcaatgggtatttaagtataatatcattctcattgtgaggagaaaaaataattatttctgcctagatgctgggaaataaaacaactagaagcatgccagtataatattgactgttgaaagaaacatttatgaacctgagaagatagtaagctagatgaatagaatataattttcattacctttacttaataatgaatgcataataactgaattagtcatattataattttacttataatatatttgtattttgtttgttgaaattatctaactttccatttttcttttagactttaaagctgtcaagccgtgttctagataaaataagtattggacaacttgttagtctcctttccaacaacctgaacaaatttgatgaagtatgtacctattgatttaatcttttaggcactattgttataaattatacaactggaaaggcggagttttcctgggtcagataatagtaattagtggttaagtcttgctcagctctagcttccctattctggaaactaagaaaggtcaattgtatagcagagcaccattctggggtctggtagaaccacccaactcaaaggcaccttagcctgttgttaataagatttttcaaaacttaattcttatcagaccttgcttctttttaaaactttaaatctgttatgtactttggccagatatgatacctgagcaattcttgttctgggttgtcttatgtgaaaaataaattcaaggtccttgggacagataatgtgttttatttatctttgcatatccattacttaaaacagcattggacccacagctggtacaaaattaattactgttgaattgagcaaatatttattctaaatgtctctgtcaaatgacagagtgtggttgtgtggattaagtccctggagagagttctttgttctctcatgttctatgctgtggttcttgctttatgcaaaaagaagtaagttacttaaaacctggacatgatacttaagatgtccaatcttgattccactgaataaaaatatgcttaaaaatgcactgacttgaaatttgttttttgggaaaaccgattctatgtgtagaatgtttaagcacattgctatgtgctccatgtaatgattacctagattttagtgtgctcagaaccacgaagtgtttgatcatataagctccttttacttgctttctttcatatatgattgttagtttctaggggtggaagatacaatgacacctgtttttgctgtgcttttattttccagggacttgcattggcacatttcgtgtggatcgctcctttgcaagtggcactcctcatggggctaatctgggagttgttacaggcgtctgccttctgtggacttggtttcctgatagtccttgccctttttcaggctgggctagggagaatgatgatgaagtacaggtagcaacctattttcataacttgaaagttttaaaaattatgttttcaaaaagcccactttagtaaaaccaggactgctctatgcatagaacagtgatcttcagtgtcattaaattttttttttttttttttttttgagacagagtctagatctgtcacccaggctggagtgcagtggcacgatcttggctcactgcactgcaacttctgcctcccaggctcaagcaattctcctgcctcagcctccggagtagctgggattagaggcgcatgccaccacacccagctaatttttgtattttagtagagacagggtttcaccaggttgcccaggctggtctcgaatgcctgacctcaggtgatccgcccacctcggcctcccaaagtactgatattacaggcatgagctaccgcgcccggcctaaaaaatactttttaagatggtgtaaatattactttctgtatcaatggtacattttttacttgtcagtctctagaatttctttataaatatgttgattcagttcatttttgtagattataaaacaggtaaaaaaggataaaacatttatgtgaattaaagggaatacctaatttttgtgtagagtttattagcttttactactctggtttatggatcatcacaccagagccttagttactttgtgttacagaataactaatatgagtgaatgaatgacttacacaagtcactgcttaggataaagggcttgagtttgtcagctagagtatgacagaaagtatctaagttttggagtcaaatagcactttgtttgaatcccagattgcatgcttactagttatgtgaccttagtcaagccacttcacctcactgagtctttgcttttttcatctctaaaatagagatacccaccgctcataggctgtcataagggatagagatagcatatggaatgagtctgtacagcgtctggcacataggaggcatttaccaaacagtagttattatttttgttaccatctatttgataataaaataatgcccatctgttgaataaaagaaatatgacttaaaaccttgagcagttcttaatagataatttgacttgtttttactattagattgattgattgattgattgattgatttacagagatcagagagctgggaagatcagtgaaagacttgtgattacctcagaaatgattgaaaatatccaatctgttaaggcatactgctgggaagaagcaatggaaaaaatgattgaaaacttaagacagtaagttgttccaataatttcaatattgttagtaattctgtccttaattttttaaaaatatgtttatcatggtagacttccacctcatatttgatgtttgtgacaatcaaatgattgcatttaagttctgtcaatattcatgcattagttgcacaaattcactttcatgggctgtagttttatgtagttggtccagggtgttattttatgctgcaagtatattatactgatacgttattaaagaatttcctacatatgttcactgctgctcaatacatttatttcgttaaaacaattatcaagatactgaaggctgattggtaactcacatggaactgggagagtatacaattctgaaccaaatagatgattctctattattatatcttaatttatgtgttatggtatattaaacatgaaaaaaattgtatttggttagaatatgtttgctcttccttaactcgggaatgacatagggtaatattcacagattgggttcctataaatcctccacttgaagtgaagtcagttcaagtaatgaaagctacctcctgagatagaatcagtacttggcacctatctctagtgttctttcacctcatataacctttcactgattagtaaagattatatccaacaaagaaagtacagcacagactgagatatgattactgagataaatttgggcaaaatataaactacagcatttctgtagcaatgagaccatttttcttcagttgagctccatgttctacaaacttcaatcaaaaaaggttctaggagactcagtgaaagttgatacactgttcaaggaacaaataatttcagcacatgggaatttcacagggaaaaatatactaaaaagagaggtaccattttggatggtgtcaatatgggttatgaggaattcaggctgctgagtccagtgtacaatggaaactgagctgcaggtgtgtgattgtaacaacaaaagaaatgctgaaatattaagtcctttgccatgtaaatagaaaaagagtatttatttcccaaacattattgctcacctgtttttgttatgcctttcaagataaatccaggaaaggaattgcattttctttccagaaaacaagttcttgggggaattgttcaattggtagatgttgtttttctcattaacaagtgagtgctccatcacacttgctgagtgctccatcacacttgctctctgcattactcctctgcctgcaaacacatatatagcaagggtgatgacaaggatatcagagggtctggttttctcaaactcatgataaactcatggctgggtcattcttggtgctgattttactttgttttttgttgttattgttccctcttcctcaaaagatgaaatctatccctcttacttggaatttctctttgatatatagcgaatgtttggttgtaacctgtataatctggcatgaaattgtcactcgaaaaggctagaagtgttgacataaatatgggacagcaagagttgctcctactcaagagagcaaatataatgttctggaagagattggcagaattcacatcaaaggagtgattacttcagcctgggccactgttgtactggtcaaaaggctgtgcaaagctctctgaaaatccactcttttattgctctttagtaataaagtcactttcaattttaaaaataacaaactgatatatttttatgactcataaaatgttagcaattatattatggagaatctactttctgggtgattcttacaaatgttcttggatctatttttttttcttatagtacctattcttcccatttttctcagctctagttaatatatttcaacaacagttcaacaaatttaacatttttataaaaagtgtttcctatcattttataaataccagcctagtccatgttattccttttcttgttgaggagaaaggacacacattgtaaattcaaatatagacctctactgtgctatttaatcttggtaacaactccacaaaggagatgacatgttttccttctatagaggtagattctgtaaagttagagggaagagtgacttgcttaagatggcataagctgtaactggcagaaccaggattcaaagccaggtgggatgccaaaatcataatctgtcttcagtgtcaagttactgaaattggtaaacattagacctaaatagacggaattgcaatccgggttgggcacattaaactccattttcttcatcaatgtgctcagattacattttacttttcaggctaaaaatggaaaaaaagagtccctcttagttctgcacttgagaatgagaatagcttttctgaattatacaaggaagaagaactaatgcccaaatgccaggtacccacatgcactatgccatggcacagctgttgccccctttcaccagagccctctctctgtatcctggttgacctttccttgggcaagagctgggtggggaggatcacaagtgactccaatttggatggcttcgggaagactgggaccgagctgaaggcagtgttgtcctctgcactccctgttttctgtctgctggagcactgaagcctcacatatgtattaaaaaaataatttccatttgcatttcagactagaagattgaacgtatagtgtaatgtgattgcaaataattatattgaaatgagacagagaggatgtagtatctactgtcataatttttcaaaacccacctgcaacttgaattaaaagaaccacttgggtttttttttttgtttcaaacgcaaatcctggaaacctactgagactcattcagtcagtatctctaagaggcaagcttgagactgtatatttaaaaagcatctcaggtgatttttacacatgctaaggcttaagaaccacttctctgtagcttatatgttattttcaatgttcctcaaagccaagttagaatttccaaagtgttaagaatccattagacaatcacagaattgtctttttcctttataaatcttgcaatgttgttctcatttccatacttaattacttaaaacaccaaccaaccaacaagcaaaaaatgattagtctaactaatattacaagttaataatgaagtaaaggtttaaaaataatgtcataataatgttaataacaaattattaattataatttaaaaataatatttataatttaaaaataatatttacaagtactacaagcaaaacactggtactttcattgttatcttttcatataaggtaactgaggcccagagagattaaataacatgcccaaggtcacacaggtcatatgatgtggagccaggttaaaaatataggcagaaagactctagagaccatgctcagatcttccattccaagatccctgatatttgaaaaataaaataacatcctgaattttattgttattgttttttatagaacagaactgaaactgactcggaaggcagcctatgtgagatacttcaatagctcagccttcttcttctcagggttctttgtggtgtttttatctgtgcttccctatgcactaatcaaaggaatcatcctccggaaaatattcaccaccatctcattctgcattgttctgcgcatggcggtcactcggcaatttccctgggctgtacaaacatggtatgactctcttggagcaataaacaaaatacaggtaatgtaccataatgctgcattatatactatgatttaaataatcagtcaatagatcagttctaatgaactttgcaaaaatgtgcgaaaagatagaaaaagaaatttccttcactaggaagttataaaagttgccagctaatactaggaatgttcaccttaaacttttcctagcatttctctggacagtatgatggatgagagtggcattttatgccaaattaccttaaaatcccaataatactgatgtagctagcagctttgagaaattctaaagttttcaagtgataagactcaatttatacaaagctaattggataaacttgtatatgattaagaagcaaataaatacttattatgcttttttgctgtttatttaaatatttaacccagaaaataagtcactgtgacagaaataaaaatgagagagaagggtgagccactcttaggtagttctggcattatttaatctaggccagaggttgcaaatggtgtcccatagaactaattttggctcctagacctgtcttatttaacctttcatttaaaaaatttgtattggttgccagcaattaaaaattgggagatgtctcacacacacacacacataaacacacacactcatgtgtgcagcctcttttgaagaattggaataactagtcaactgcgtcctccttttccacaagctgtgacagctccctgctcacagagcacctgccctctcctgttcatcatgctctcttctcagtcccattccttcattatatcacctatttggtcctgagactaagtgagtttgagatctgtgatttagacaaagtggtgaatctagctctgaatcatagtaagtagctctgggaatcatcttgtcttctgttagcccattgagagagaaatagagagagagagagagagaaagaaagaagaagaaacagatctggggagagtcactgaatgggagcatagagacagagaaacagatctagaaaaccaaactgggagaaaatgagagaaaccaaaagagaggtagagaggagcagagaagaaaatgaagaagcaaggcaaggaccaggctttttcattatttcttatggccaagacttcagtatgcgtggacttaattcttccttatgctcctaccttccctagggaaactgatttggagtctctaatagagcccttcttttagaatcacagtttgatgccttaaaactagttatataccttcacatgcttccttaacccacagaagtgatgctaatgaggcccttaataaggagcgtgctattaagatgaagacattcattttttttctccgtccaatgttggattaaggcacattagtgggtaattcagggttgctttgtaaattcatcactaaggttagcatgtaatagtacaaggaagaatcagttgtatgttaaatctaatgtataaaaagttttataaaatatcatatgtttagagagtatatttcaaatatgatgaatcctagtgcttggcaaattaactttagaacactaataaaattattttattaagaaataattactatttcattattaaaattcatatataagatgtagcacaatgagagtataaagtagatgtaataatgcattaatgctattctgattctataatatgtttttgctctcttttataaataggatttcttacaaaagcaagaatataagacattggaatataacttaacgactacagaagtagtgatggagaatgtaacagccttctgggaggaggtcagaatttttaaaaaattgtttgctctaaacacctaactgttttcttctttgtgaatatggatttcatcctaatggcgaataaaattagaatgatgatataactggtagaactggaaggaggatcactcacttattttctagattaagaagtagaggaatggccaggtgctcatggttgtaatcccagcactttgggagaccaaggcgggtggatcacctgaggtcaggagttcaagaccagcctggccaacatggtaaaacccggtctctactaaaaatacaaaaaattaactgggcatggtggcagatgctgtagtcccagctgctcgggaggctgaggcaggagaatcacttgaacctgggaggcggaggttgcagtgagctaagatcacgccactgcactccagcctgggcaacaaggcgagactctgtctgaaaaagaaaaaaaaataaaaataaaaataaaaagaagtggaggaatattaaatgcaatataaaagctttttttatttttaagtcatacaatttgtttcacataacagatcaggaaataatacagagatcataagttttggagctgggtttgaatcctggctctgccatttactttctgtgtaatctaagtcaagttactgaactttgtgggccctctggctctccatgtgtaaaatggagaatattaatatttaccttgcaagtttgttgtgaagactgaaggagagaatttaggtaaaacattcatcagagtaccatgcacacagttgttcctcaataaacattagcttctctgattgcaagttccagtctaaagtgctttatatataccagccaataaaaggatgcgagagagatataccagtgtattgttttctaccattttaaacctattttcatccactgttacaaattctatcatactgctccacataaaaaatattatcaatgatttttagtctctgaagtgcaatatttgattattgagcacacctgttgaagttttagtttcttctcacttacatgggttgtgtaaaggtaggaggtataaaaccagtgtcctaggtctaaatctttcttaatgtcatactttggattcattgatataagtaacttgagcaccagcgcttcattttacttcattttttaaagatatagtaagagtaattcccatctgcctagcaaaattgttttgtagaaaagtttgtggatcagatttattttactttgattttaggaatttcaagtgtcttcgtcggcatgaaggaaaaatatgcagtttgacattttctactactttcaggtcattattttcctactctggtgcaaaaaccctcaattcctgtctcactccatctaatcaaataggtagcatgcttgagcccttactatgtgccaggcactaggataagcactttatatgttttgtcccaattaattctcacagcatttctatgacctaaataaaattaatattttcatttcaccaataataaaatggaggcttcaaaaagtttagggacttggctcagctcacacaactggcaaggactgaaaatggattttagtcccaaatgtcataggctagagccctttcactaaactgttgtcttccatctggtggcatcctcttcctccagtctttgtcacctaaactctgggcaccccttgatggcatttacttatgatggtgatgcttgttaaacttcctgtttgcgacttcaacgtccatataaatgagtcttccaatactgtacttagaacttatattttgtagtgacttctttaaaagctttctctcttagtcatatcctgagttttgttagcacctggacttaccttactttggaaatgttgcactctgaaatctctttctcagcttggaatttcctaatcttccaactgtttgagtcttttaattctacatttactgcctttccatttcatcaggatttctagtctctttaattcttccttttgaactcctcctgatttaacctctgcttattcgaagaacaataattttattctctcagctgcactctcaattcccttttccttttggtgatttttctttttcctacagaacacttactttatcagttttggagaaggaagtgctatctgggtaacagtagtgctatctgttgactctagtcaactgtaagttttatacatttattgtttaaaccttatatgggtctataatccttcttgggaaatcctttcatttgtctttaatttcctttaccatttccctaaaggctattccagatttttatcacattcacaaaattcccgtcttttctcaggatctgttcacccccagtagatagccttgtctcccacaatacatggagaaaatagaggccaccgtcatatttgaatgtttccaacttctctcttcacctttggaattatctttttcttcttttgtgtctaagagaaagatgtatacttcttcttacccttgtctgaactactctattttgcttcatcttctcagaacaggggaccagcaattattcttcctccagaagcttcaacatcttttgtcaactgactccttctcatgtttaaatattttcaagttaaacaatttctttcctgactttcgctcacgcaacctcatgcccaaaaccttatcactcttcttccctttgctgtcaaggctgttctcacttcttcactttttgtggacttctccccactacaacatagattctgctatcaccaatctattaaaactgttatactcttgtggaatttatcatttaatttagcttcagtgaaccgttctttccagattattttggcctcagaccatgacttctaagtctgccgtgcttgccacttaagtgatgatgggccagtgggtccccacctaggcctctgtgttagtctgttttcatgttgctgataaagacatacccaagaatgggcaatttacagaagaaaggggtttgagggactcacagttccatgtgactggggaggcctcacaatcatggtggatgatgaaaggcatgtctcacatggaggcagataagagcatagaacttgtgcagggaaacttccctttattaaaccaccaggtcttgtgagacttcttcactatcacgagaataggatgggcaagaccctcccccatgattcaattatctcccactgggtccctcccacaacacatgggaattatgggagctataattcaagatgagatttgggtgaggacatagccaaaccatatcagcctccttctggctttttatgttctccgtgggtgacctctctcaggctcaagtgataaccaatgtgctgatgactctcaaatgcgcatctctggcttcagtttcttccttgaacttcatacatatgtttccaaatttcctgcgtgtacctcaaggttcttgttcatcacttcccaagcttcataaacgcactcattttagtgtattctctgtctcctttgatagcatccctgagaggcaagtccctggtgagttatatacaactcctcccttgctccaaacctgagagtaagtaacattcctattaacatattaggaagctgaggcttagacagtttaagtaactcaagcatggttacacaactagctagggcagagctaaaatgtcaggctaggcttctgtgactccaaagccctttctcacttagcatatcatcacttatttttttttttaatcacatatatgatttttttttctttaagagatagaatcttgctctatcacgtgggctggagtgcagtggcacaatcatagctcactgtaaccttgaacttgggctcaagtgatcctcctgccttagcctactgagtagctagggctacagacacacaccaccatgcctagctaattttattttattttattttattttttgagacagagtctcactctgtcacccaggctggagtgcagtggtgcgatcttggctcactggaacctctgctgcccgggttcaagcgattctcctgcctcagcctcctgagtagctgggattacaggtgcctgccactgtgcccagctaatttttgtatttttagtagagacggggtttcaccatcttggccaggcttgtcttgaactcctgacctcgtgatccactcgcctcggcctcccaaagtgctgggattacaggtgtgagccaccacgcctggccacctacctaatttttaatttttttgtagagacagggtctcactacgttgcccaggctggtcttgaactcctgttctcaaacaatcctcctgcctcggacaccccaagtgcagggattacaggcatgagtcattgcagctgacctgtatatatgatttttagtatatgtaaatatacatatttattaaatgtaaatataaatataaatgtgtggagtgatatccattgaaatgttaaacatagttctcagtggtacaactacaggtgatttctcttttcttatttctggttttctgtgttttccaaatttcttgaaatgtgtcttctgtaatcagaaataaaagttattagtaacaacagtcttccactggtacaagtgcttattggataaaagtcccacttctaagcatgatactcacaacttttaggttaatagcctttgtcaccttgccatatacatctgatccagccactcacaccattcctgagatatattttgttcctttgtgcctaaatcattgtgcatgcagatccatcttcctggaacacctataaccatttcttagtcctgtgaaatcctacttacatccttcatagcctagcatgtatgtcatttatttggtcaagggtgagttggttgttctcttgaatgtactgccatatgacgtggtgtgatttcaattgtagcaccaagctcattgcaatattaattcgtttgtcattctcccatgtaggatgtttgaagtagtttctaacacagagattatactcaataaatatttattagataaataaatgaataagggaataacaaatgcctttgtctcattttaaaatactttcattgttagctacccatataataaaaaactaaaagcagtagttttcaagcatgattgtttatgtatgccttaaaagaattttgaaaacctatgtacccctgacacacttttaagttaacttataaatttttcaacatagttttaagtggtggcaaatgatgtagtttcttgtgtattttaaactgcttaagtatgctatacatggatttcttcaaaaccctgaagctgcagtttcagtgcattcaatttatggaaaagaaattaatttataaaattggttcttattgtcaagtcaatcagctaaatataacttgctttctgtcaggaaaagtctgactttaaaatacagataagtaataactattattaattaattaaattattaaaattaaaataattaaataatttgttaattaaaatgccttattcccctacttatttctgcaatttgactctaagaatagataggacatgtagattgccttaggtttgaaatctgggtgaaataagatactgcctccttcagtatttctgcctttgcttttatgggagcctctttcaagaaaaagtcattctctcatggtccctttgtttgagtcccagaggttttcctactccagaaagtgcaacgtagtgagactagtactatactcccttgcatggtaagtgagaaggctgtctgtataaaatgagggaaggactcatgagagggaagtaggtcaggagaaatgataggttctcaggcaggttaattttaggaaagagtgaatagagtcccttaaaacaaggtgcatctgcttcctcctgatcaatctttaggactgtttactttgatttgaagaccactatgctaaagcttcccacgggggcaatagtgaggcaaggaatttttaaaagggaattacttcttcgtagctacttttgtgaaatgaattcatttgaattatctggcaatctcttcatatttatattcaacaataattacttaaagaaatgctttgagcttctcagaggagggtgctaccagtgtgatggagtagaattcagatttgggtagtgactttaaagctgtgtgactttagtcatttaactgctgagtcacagtctacagctttgaaagaggaggattataaaatctatctcatgttaatgctgaagattaaataatagtgtttatgtaccccgcttataggagaagagggtgtgtgtgtgtgtgtgtgtgtgtgtgtgtgtatgtgtatgtatacatgtatgtattcagtctttactgaaattaaaaaatctttaacttgataatgggcaaatatcttagttttagatcatgtcctctagaaaccgtatgctatataattatgtactataaagtaataatgtatacagtgtaatggatcatgggccatgtgcttttcaaactaattgtacataaaacaagcatctattgaaaatatctgacaaactcatcttttatttttgatgtgtgtgtgtgtgtgtgtgtgtttttttaacagggatttggggaattatttgagaaagcaaaacaaaacaataacaatagaaaaacttctaatggtgatgacagcctcttcttcagtaatttctcacttcttggtactcctgtcctgaaagatattaatttcaagatagaaagaggacagttgttggcggttgctggatccactggagcaggcaaggtagttcttttgttcttcactattaagaacttaatttggtgtccatgtctctttttttttctagtttgtagtgctggaaggtatttttggagaaattcttacatgagcattaggagaatgtatgggtgtagtgtcttgtataatagaaattgttccactgataatttactctagttttttatttcctcatattattttcagtggctttttcttccacatctttatattttgcaccacattcaacactgtatcttgcacatggcgagcattcaataactttattgaataaacaaatcatccattttatccattcttaaccagaacagacattttttcagagctggtccaggaaaatcatgacttacattttgccttagtaaccacataaacaaaaggtctccatttttgttaacattacaattttcagaatagatttagatttgcttatgatatattataaggaaaaattatttagtgggatagttttttgaggaaatacataggaatgttaatttattcagtggtcatcctcttctccatatcccaccctaagaacaacttaacctggcatatttggagatacatctgaaaaaatagtagattagaaagaaaaaacagcaaaaggaccaaaactttattgtcaggagaagactttgtagtgatcttcaagaatataacccattgtgtagataatggtaaaaacttgctctcttttaactattgaggaaataaatttaaagacatgaaagaatcaaattagagatgagaaagagctttctagtattagaatgggctaaagggcaataggtatttgcttcagaagtctataaaatggttccttgttcccatttgattgtcattttagctgtggtactttgtagaaatgtgagaaaaagtttagtggtctcttgaagcttttcaaaatactttctagaattataccgaataatctaagacaaacagaaaaagaaagagaggaaggaagaaagaaggaaatgaggaagaaaggaagtaggaggaaggaaggaaggaaagaaggaaggaagtaagagggaagcagtgctgctgctgtaggtaaaaatgttaatgaaaatagaaattaagaaagactcctgaaaggcaattatttatcaatatctaagatgaggagaaccatattttgaagaattgaatatgagacttgggaaacaaaatgccacaaaaaatttccactcaataaatttggtgtcaggctgggtgcagtggctcacacttgtaatcctagcacttttggaggcagaggcaggtgaattgcttgagtccaggagtttgagaccagcgtgggcaacatggcaaaccccacctctacaaaaaacacaaacaaaagaaaatagctgggtgtggtggtgtgtgcctgtagtcccagctacttgggaggctgaggtgggaggatcacctgagcctgagaagtggaggctgcagtgagccatgattgcaccactgtaccctagcctaggtgataggctcaaaaaaaaaaaaaattggtgtttgcaatgctaataatacaatttggttgtttctctctccagttgttttcctacatacgaaacagcttttaaaacaaaatagctggaattgtgcattttttcttacaaaaacattttctttcttaaaatgttattatttttcttttatatcttgtatattattactagcagtgttcactattaaaaaattatactataggaggggctgatactaaataagttagcaatggtctaaacaaggatgtttatttatgaaaaggtagtaattgtgtttcatagaatttttaaaattaattctgcgtatgtcttcaagatcaattctatgatagatgtgcaaaaatagctttggaattacaaattccaagacttactggcaattaaatttcaggcagttttattaaaattgatgagcagataattactggctgacagtgcagttatagcttatgaaaagcagctatgaaggcagagttagaggaaggcagtggtcccttgggaatatttaaacacttctgagaaacggagtttactaactcaatctaggaggctgccttttagtagtattaggaatggaacactttatagttttttttggacaaaagatctagctaaaatataagattgaataattgaaaatattaacattttaagttaaatcttacccactcaatacaatttggtaatttgtatcagaagcttaaaagataacctaatagttcttctacttctataacttacccaaatatgtttgcagagatcttatgtaaagctcttcattataacactgctttcaggagccaaaaattgggtgggggagccccataaatgttgaataataggggtttgattagataaattttggtgtagttctataatggcgtgttattcagccaataaaaggtttgttaaagaatgactgtgacggatgtatatgatatactcttaagtgaataaagagttacaaaatgttatgtacaagttacaaaatgtatgtacattatgatccatttttcataaaatcatatgtatgtatatatgtgtgtctggaaggataaatttatcaagttgttatctctgaaattttgggtatattttatatttctagattttctgttactttgttactttactgataaagtaataacgttgttgacttttgtcactctcccctattaataatcatctaggctgcaaaaggatcatgtcttctttatttttatattccaaggactgtcaacaagtgcctagcacttgacaggtatattatagaaatttaactgaatatctttaggaaatagatttttgtttgtagttgttctagtctacattaaatgtcttgcgcttatgaaacttccttgaattattttagtgaagcaatattagtatagaattttgcatcactggatgcccttgactgaaagctggcttatggcatctcaccagtgtgtggggagtttcagtccttctgttgtctgcatcacagctgaagcagtgctgttgctgacaattcctgacaccaccttgtctctattattgatcattgcctcactatggtactgagttttagcttattcttgtaataactgggactcatatgtatagaataagctattagctcacgtttttgcttgctttttatacagaatacatgtctgcaaatagttttatcaatattttggaattttgggagatatgaagttaaaaacatcattgaatatatatatatacacacacacatatatatatgacactatacatgatttattttatttaatttttaaaattttattctttttagagattaggtcttactctgtcacccaggctgaacttcagtggtgtgatcatagctcactgtaaccttgaactcctgggctcaattgacctttccgcttcagcctcccaaagtgctgggtttataggcatgagccactgtgtctggtccaatatgcatatatatatttttaacctggattatcagagctatattgtgtttaggtttataaagctgtactatgtgaaaatatcacttctaggtttaattttgtacaaaggaattttatatagaaatgaggtaattcagattttttcccatgtaataagaattgtaaaatttactgaaacaaacatcaaaaagatatctgttacatgaccttcctttcttttgaatatatttcaggtgatattatttattaaaatttaaaaatgaaaattaaaatatataaaaagttgaaaattattcctttctttactgtctctcatctgtccattttccattctcctgcattccctcatccaaccaaggtagccaatccaggtaactttttttagtatcttcccagagatgtttctctctatatatataatcaatatacattttttattattccccacctctctttttatgtaacaatatgcagagttttgcttcttgcttttcccactatcttggacaactttccatattcaaagcacagaggacttgcacatatgttcagactgctgaatatttctgtctctcccctgccattcatatgttgaaatcctaattcccaaggtgatggtattgcagggtggggcctttgggaggtgattagtccatgagggtgaagtctttagtaaatgagattagtgtctttataaaagaaaccttagagagaccctcacaccttagagagaccctcacccctttctgccatgtgagaacacagcaggaagacagctggctatccaggattcaggagtctcttagcagacccaaatctgctggcaccttgatcttggacttcccagcctccagaactgtgagaaataaattcctgttgtttataagccacacagttcatggtattttgttatagcagcctgaacaaggacacacacacacacacacacacatgcacacacatttaaatagatgcatagtattctatcatatggatggatattctatgatataatgaatcactattgattgacatttgggttgtttccaatattttgttaacacaaagaacaacactacaaataactttatatacatatcatttagcacatctgcaattgtatcagtaggcttcctataagtggtcaagcatttgtgtacttgtgattttggtagatgttgtcaaatgtccttccctgaaatttgtaccaattcgtactcatgccatacactctaaatagagtgctgatttccccacagcattactaacagatgatattatctaatttaaaaagtttctcatcttatagggaaaatagtatgtcaatgtattcttaacttgcatttcttttattataagtagtgtaaaatatcatttcaacttatacacaggaggaatttctctctatataaagtgatcctagaatcataatgaaaaatatcaccaactcattaggaaaatgtacaaaggattgaatagatatctcatcaaaaataaaaatataagtggcctttaaacattgaaaggtaacatttgaacaaagacttgcaggaggtgagggattagggaatgcagactctgggaagagtcttccaagtagcaggtgaagcaagtgcaaagctttcagatgggactgactatacctgtctggtttgaagaacagtaaggaggtcactgaggctggcatagagtaagacagggagggtagaatactgtcagagaagtaatcggcggtggaggtagggggtaaaccataaagtgctcgtaaagactaaggcttatttctctgggtgagattagaggccactggagagttttaaacagaagtaacagggccactttggctaatgtttttaggctattctgtagggagacaagggaggaagcaaggagatgagttaggagtctattgtgccagttcaggcaagtgatgatggtggcttgatccaggtagtagtggaagtagtatagtaggaagtgatcagattcaggacatgctttgaaggaagatccaataggattaatggataagttgaacaatggcatatgagaaaagtcacagaggagtcaaagatgattccaagctttctggactgagtaactggaaggataaatgtgccgtttactagaaagataatgggagaaacaggttttggatggagcttggtttgggaatattaagtttgaaatgcctatttgacatccaaatagagatgttagttggatgtacaagtctagtttcaaggaagagggggctggtagtgtgaagatggggctggataagattctaaaggaaagagggttgataagaagagaaaggggtgtaggggttagcctaagggcattctaagtattagaggttaaggaggtgggtgaagaaaacccaataaaataaaagtctgagaagacaaagctagtgaatgaatgtggtatcccggaacccaactgatgtcaagcagaagggtgttatcaactaggtcaaatgctcattcatcaagtaagatgaaactgttataattaaccggtgtcttctgaaatacggagataactcgtgacttaatgaaagcaatagtagagaaggtcaaacttgaccagaatgaaattagaaagaataagaggaaagaaaagaccaaatacagacaaccattgatgccttattcttttgatatactcctggagtccacttgctaatacaattgacccttaaacaatacaggcttgaactgcatgggtccacttatttgtgaattttttttcagttaatacattggaaaatttttggggttttttgacaatttgaaaaaactcacaaactgtctagcctagaaataccgagaaaattaagaaaaagtaagatatgccatgaatgcataaaatatatgtagacactagcctattttatcatttgctactataaaatatacacaatctattataaaaagttaaaatttatcaaaacttaacacacactaacacctaccctacctggcaccattcacagtaaagagaaatgtaaataaacataaaaatgtagtattaaaccataatggcataaaactaattgtagtacatatggtactactgtaataatttggaagccacttcctgttgctattacggtaagctcaagcattgtggatagccatttaaaacaccacgtgatgctaatcatctccgtgtgagcagttctctctccagtaaattgcatattgcagtaaaaagtgatctctagtggttctcgcatatttttcatcatgtttagtgcaatgccataaaccttgaataacatcaagcaatccatacaaagtgccactagtgatgcacggaaaagttgtaacagtacaagaaaaaagttgagttgcttggtatttaccatatattgaggtctgcagctacagttgcctgcaatttcgagataaatgaacccagtataaagactgttgtaacaaaagaaaagaaaatgtgaaaccatcagtgcagctatgccagcaggtgtgaagtcttgcactttttgcaaaatacaaaatatgaaatatgtgttaattgactgtttatgttatctgtaaggtttccactcaacaataggctattagtagttaagtttttgtggagtcaaaaattatacgtggatttttgactatacagtgggttggcacccctaaccttcatgttgataaagggtcaatggtatattatttaatttttttgtatttatattcataaataagattaaatctatatttccaagtaatctctataagattttgttattaatattactattatttttgagacagagtcttactgtcaccaggctggagcacagtggtgcgatctcggctcactgcaacctctgcctcccgggctcaagcaattctcctgcctcaccctcccaagtagctgggactacaggcacgcacaaccacactcagctaatttttgtatttttagtagagacggggtttcaccatgttggccaggatggtattgatctcttgacctcatgatctgcctgcctcggcctcccaaagtgttgggattacaggcatgagccactgtgcacagccattaatattattgttacccaataaaaaaaatttggaaacttgtcttcttttcccctgattctgtttaaatagcactggagttacctgttttgaattttttttccaagcggtcccttatgagttttctctatgttttatttgtttcatttctttttttttttttttttttttttttgagacggagtctcgctctgtcgcccaggctggagtgcagtggcgggatctcggctcactgcaagctccgcctcccgggttcacgccattctcctgcctcagcctcccaagtagctgggactacaggcgcccgccactacgcccggctaattttttgtatttttagtagagacggggtttcaccgttttagccgggatggtctcgatctcctgacctcgtgatccgcccgcctcggcctcccaaagtgctgggattacaggcgtgagccaccgcgcccggcctgtttcatttcttatatcgtatttttgcaactcctttattgatacttttcttcctgattaggtttctactaaaaccaaacaagctttccatgaattagcttttagatttacttattagtttaactgttctgttgtattgtaactcattaatttataattttatctttattaattattctatttttcttcgcttttttgttgtttttctagtttttgagttagatgtttgacgcttttttaaaaagctgtgcattttcctctgggtaatactttagctgtatattatgtattctgatatatagtgtttccattacattgttttctagaaaatctgtagctttgatttatatttgtttcctctttgacctaagatatcctaagggaaaatttaacattttccagaaagaaaacaaattttctttgttttccaagaatgttgttcaaattatttctactgcttggaatttttatcatttttgtgtatccagtaaatagtcaatatttgtacttgctctctgaccacataaaagaatatattcgtgtagtttctattaatagattagagttcaattcagatattaaatgtacatcattattcatgatatttaggtcttctacatcttcacttatcttttttctacttgctttgccattaacagataaagttgaattaaaggcttctactacatacatttctccctgttattccttataggttctgtaatttttgcttcaagaatattgctttttaaatttaatatatagatacttataattacactctagcattataaagagccttttctttttcattgaatgtatttgggcctgcatatgtctaacatgaaaattatagtcctttttttgtttctttgtttgtatttacagttttaagttccattttcaacctttatgcactctttgctttaggtgtgtctcttttagttagcataaagttaggtttgtctttaatttcacctgaagtcttttcctcttaatagatgggttaagccaactgaaaaataaaactgacttatatacttttatttcaagtatgtcctccacaaatattttttgaatagattagcttatatactttggaatttgttaaaaaaagatttttataaaaaataattgtggtgaaatgtacataacataaaatttatcattttgaccatttttaagggcatagctctgtggcataaagtatactcacatagttgtgcaactatcacctccttttgatttttttttactaattttgtaaatttgtttcatctgagctgtcttattatgttttgttttatgtttttctttcctttattatgaagtcactgtattgtctgtaggctatatgtatctgtgagtgtgtgtgtatatgtgtgtattatggtttttaaaaaagtctatatttgttttccagtggctatacttaatactaataactttatgttaaatttttcattctatgtgactctagttcactaatatgagctctgataaaatcagtgctttttcgaggttaggagatcaagaccatcctggctaacacagtgaaactccgtctctactaaaaatacaaaaaattagccagacgtgatggcgggtgcccgtagtcccagctactcgggaggctgaggcaggagaatggcgtgaacccaggaggcagaacttgcagtgagccgagatcgcgccactgcactctagcctgggtgacagagtgagactctgtctctaaataaataaataaataaataaataaataaataaaatcagtgctttttcttcctctgctacctcctttccttctactcagttttagtcagtagtattatcttttttcagatttatctttgtattgttaaatctgcttatgcttctattactttatttattagctttaaatgataccttttgactttcagcttttcttaataaagcaatcagcaaatttcctttacactccacacttataccccatttcctttgtttgtttatttggtttttacttctaacttttcttattgtcaggacatataacatatttaaactttgtttttcaactcgaattctgccattagttttaatttttgttcacagttatataaatctttgttcactgatagtccttttgtactatcatctcttaaatgactttatactccaagaaaggctcatgggaacaatattacctgaatatgtctctattacttaatctgtacctaataatatgaaggtaatctactttgtaggatttctgtgaagattaaataaattaatatagttaaagcacatagaacagcactcgacacagagtgagcacttggcaactgttagctgttactaacctttcccattcttcctccaaacctattccaactatctgaatcatgtgccccttctctgtgaacctctatcataatacttgtcacactgtattgtaattgtctcttttactttcccttgtatcttttgtgcatagcagagtacctgaaacaggaagtattttaaatattttgaatcaaatgagttaatagaatctttacaaataagaatatacacttctgcttaggatgataattggaggcaagtgaatcctgagcgtgatttgataatgacctaataatgatgggttttatttccagacttcacttctaatggtgattatgggagaactggagccttcagagggtaaaattaagcacagtggaagaatttcattctgttctcagttttcctggattatgcctggcaccattaaagaaaatatcatctttggtgtttcctatgatgaatatagatacagaagcgtcatcaaagcatgccaactagaagaggtaagaaactatgtgaaaactttttgattatgcatatgaacccttcacactacccaaattatatatttggctccatattcaatcggttagtctacatatatttatgtttcctctatgggtaagctactgtgaatggatcaattaataaaacacatgacctatgctttaagaagcttgcaaacacatgaaataaatgcaatttattttttaaataatgggttcatttgatcacaataaatgcattttatgaaatggtgagaattttgttcactcattagtgagacaaacgtcctcaatggttatttatatggcatgcatataagtgatatgtggtatctttttaaaagataccacaaaatatgcatctttaaaaatatactccaaaaattattaagattattttaataattttaataatactatagcctaatggaatgagcattgatctgccagcagagaattagaggggtaaaattgtgaagatattgtatccctggctttgaacaaataccatataacttctagtgactgcaattctttgatgcagaggcaaaatgaagatgatgtcattactcatttcacaacaatattggagaatgagctaattatctgaaaattacatgaagtattccaagagaaaccagtatatggatcttgtgctgttcactatgtaaattgtgtgatggtgggttcagtagttattgctgtaaatgttagggcagggaatatgttactatgaagtttattgacagtatactccaaatagtgtttgtgattcaaaagcaatatctttgatagttggcatttgcaattcctttatataatcttttatgaaaaaaattgcagagaaagtaaaatgtagcttaaaatacagtatccaaaaaaatggaaaagggcaaaccgtggattagatagaaatggcaattcttataaaaagggttgcatgcttacatgaatggctttccatgtatatactcagtcattcaacagttttttttttagagccccattcttattttttatacactttgagagcataatgaaaagaaaagctacctgcaaaagttttggacttacctcaaagaggatatacttcattcctcaaaaggccttcttccaggaatagtatttcataacctggaggttggaaaaatctggatttgttacaaaaaaatctgagtgtttctagcggacacagatatttgtctaggaggggactaggttgtagcagtggtagtgccttacaagataaatcatgggctttatttacttacgagtggaaaagttgcggaaggtgccttacagactttttttttgcgttaagtatgtgttttcccataggaattaatttataaatggtggtttgatttcctcaagtcaacctttaaaagtatatttagccaaaatatagcttaaatatattactagtaataaatttagtactgtgggtctctcattctcaaaatgagcatttactaatttctgaacactgtgctaggtcctgggaataccaaattgaataagacatagtctatttttctgaagggtttatagcagagtcccctgtgttaataatgaaggagtgtgtggtatgtgaatcatatatcaatagggttgttaaaaataatgaaaaaaggagaagaggaagaacatcttttttttttctgattgcacgggcagccttaaaattatttttgaagtgtacaattcagtgtttttttagcatattcacagggttgtattatcatcaccatatttttggcctcttgaaaagaaatcctgtgcctattagcatccaattaccgttcctttgtagctaagtctcccccattccagctttaaacaatcacccatctactttctgtctctataaatttgtctcttttggacatttcacataaatgaaataatataatagggttttttgtgcctaaataagcttctaaagaagaataaggtaaggaatcatcattcagcaaatatttattaagacttgctttattttatacagtgtactaggagctggagatgaaaatatgtgtagaacatgaatcatatacttcgggaatttgtggactagtgggaaagattgacatatcaataacaaatcgaattagtgatgtaatagaggcatttttacaggagtaaaatgaggtagcatggactctatctgggtctgaataatgtgaggagtaacctccttacacaaagaggcacaaggctaatgtcctctgatggaatgattcaccatgcaattctaagggtgacaagaatgaaagttagggccttgaagaaatattttgattaagagctgccaataaagtagagtaaagattagattgatgtgaagaagtgggagattaatgagtaaatggtcactggcttgttgagaagattaaatgagatgtacatgtaatgtacctaacacaacgtcttgtacaaagtagccattcagtagagactagcttgtattatctccctttgaggtaaagaaaactgttagaaatagtatttctactactgatagtatttcttctacttatgcctccctttgaggtgaagaatactgttagaaaacatgacataggagaaatacccctgagagacagttcttattagtgactactgtgcagaaaagatggaggttggtgtaattaaggagaaggaaagccatgaagccaaagtattatgaaaaagcatcaatatgaattttcatgttgacaaagtggtataaaagataattataaagatggtcacttataaatacggtagttctgtgtgacacaatttacagaagttggtatatcgtgtggaagaaaacagcataagatcctgaaggtttgaactgtgggcacattggctccatgctcaggaaatggcaatggggttgggaagtgattccactttatgtccctttcagacacataaaaattacttgtgtgagtatcttatgccagacactattcactgtgtagtgagcatggtgggtatgaaatgacaactttattgtctttcctgtcaaagaacttgtaggctggttgggggaaagagaccatttcaatatgaagtgctgagctagaggtacccttagggcactacagaagcctagctgatggcttttagcctggctagacagttcaggatctctaaaagcaggtgccttgaaggctgagtcaaatacaaaaatgtattttggacagaggaaattgtatgaacagaaacacagaacatgaaactacttggttggtgcagggtatcatcagcatagaaccagacagaaccagagtgtaaataagccagaaggccatgtcatggaggccttgtataccagtctcaggaatttggttgtggagagctttcatcaggggaatgatgtaatcagcttggaaatgtagatatatcactgactgtgatagtgaggagcagaattaaggtggacgtgattagaagctttgtgaatagcagaaagaacatagattttgaaagctggcagacgtaggttactgaagaaagttacttaaccttgctatgtctttagttttatcctctgcaatatggggataatactgcctattttgtagagtcttgtggattcttctggcatatataatagaaaataaaacagctattattattattgttgatggtactatttgctatatctgactacaaggagaaagactaataggaaaccatttcaggaatccagatatggtcatgatggacaggaagagacaagagttacatagaggaattctgggaagataagaaatgtcatttttatgtactgtttgcatccatcagacaaggcatcaggaaaaatgatccttcaggaaagagtgattttttttcttcaagaaattagaagaggggagaaattggtttaagattaaggactccatgcataagagaaactgggagggaagacaggtagaaatgctatggggttaggaaggaagaatgcagaggtggattacttagaattgagacatctgatcaagacagagggatcacagcttttgctaacaaagtactagtggaggatgccactaggtgaggtttaataaataattgttgacaataagttccatttaaaaaataaacaatttatgcttcttctttgcctaagtgtcaaataaaacattcagatttttatttcaaagtatccctgagtccctgttcccttttttgtcctgctgacttttggaactgatttaggcttccttagtcatctcataatagaaaaaatcagccaggtatttcctacatttcttgtattttaaaaaaatgtaatggatgtaatgaattttaagcaaatgtaatgaatacaataagtaacttagtatatgctgttttcttctctatgctgaatgtttcatacatgttattttctatacaactacatggtcaattccttgaaaatatcaactccaaaatctttattttggtatactccacgtagcacattgagagagttttaaactcttgttggatgactgtttcaaaagtgttttgaagtaggcatgtcagttgcaaaaagtttgctcagcaaatgttgttctgtctcacagtctcagacattgagcagatgattacatgacagcacgtgattgctgggagtaacagacaaaagtaactgaaagtgctcggttatcttgacagtcaaaatcaaaagtgtcccctattttcagtgacctaagagtttctttttgtgtttttggtattgttgttaaataagtgttctcacctttgaaaaggtcaataagaattcaatacagtataatgtctgtgtgccaaatgaaggtgccccttatttttaagtgtggaggagttttgatcataagaacttgaaatacctacagaatccttgatggttaagcagctggtgccagcacaagaatccctcaatatgttctctatgaagccccgatcaccaaatgcaaacattcatgattcagtatattttcatcttgactgccaaagttgatctgtttcttaatatattacatctagacttggaactggagatgagaacagaatattatcttcctcatttttgtgtttttgttcaactctaatgtctgcaaagcacttgcgtatgtaatgatgctcagtgtcataggagcaggcaggtaagtgtaaatttgtctggataggagaaagcatgcacaacatatttcacatagttttctgatttcagtttgtttttgcaaattattcactcagtgagatagcttaaagacgttatcacagggaaaggcatggagatagttctgtgttgatagaaaacttgtaatgtacagccatgagtgagaagtcaggttcagattcttcaccttcagtcctcctctttcataaacagctccatgtcctattttacatatcctactttaaaacgagattatagaagaatgaatttctaggcaaagtgacacttattttaaaatactattacgtatccctgtgcccattaacttatcctaccatttttcttcccctgtgtccaaaccacctttagaatctcctaaatatttgtagctattgtaaacagcactggagactttgctagtttaaaaggagaaatcaacgcaattaagccctagttaatttacttatcccttatgagattataattgtattttgttattaaaagggggacagagtacactgttctcttgcctttttaatttccagactaccacttctcctgcacttgacaataccgcagtctaccacgtagtcccatggctgacaggaggagaattctaggcaggccagtgtttgagtagtgagtaattggactgtctttacccagcaactcactgttttgtaaatgtacctgagtttggagaagtaattggcttttataaggggtgcggggtggagggttggggtggggagagtgagaaggaggtcagagctttaggatatataattggtctccacaaagttgttgtgatacttttggaaccacgtaatggtcttcattaactaagtgtctgtcatgacagccattacatatgcattataataaaaatttatttacagtgtaagttgaagaaggtaaaatctggatgtagtttctaaactctgcttggcagttttcatatttaagccactagaagaaaaaaattgggagggaagctgagaagaatttactgaaagaaaaaaatacttgggagggaaattggcaagaagtatgaaaaagcttgggagggaagtaagcaaataaatgagttaatgactgttctggaaaataaactctatcatgcagatatcacatgactgattaaatttgaatttgacctcctgctttccaggtctggtaaaaactaacctgtaagaacttgaaacttagcctttgaatggtcaatccaccactgtaggagaatttatgaatgttcagttgagagaactgaaaataaagaagtaccataggaattaacatttgcattcagtagccaagatataatggacatctgaaacaggtatttgaggccaggcgtggtgtctcatgcctgtaataatagcactttgggaggccgaggtgggtggatcacaggaggccaggagttcaagaccagcctactaaaacacacacacacacacacacacacacacacacacacactagccaggcgtggtggtgcacgtttgtagtccaagctacttgggaggctgaggcatgagaatagcttgaacccagaaggcggaggttgctgtgagctgagattgcgccactgcactctagcctgggtgacagagtgagactctgtctcaaaaataaaataaaacatatatttgaaacacattgaattatgtcccttaaacaagaataaacatcactaaatgactgtaccttgaactacctgtaattttctcctgataggtaattaagcttcaaagtactgacacttatttactgtaatatgaagcaataacttaaaaaaaaaaaaaaactattgaaccagaaccaaacaggaatgccatagcattttgtaaactaaactgctatttcatttcatttgagccctggaacttgaaaataaatgctagctaacatctgtgaacagaacatacccatcagtactgtgctaagcacctttcatgaactggtcattaaatcctcactttccatttatttagtgacaacttcacccagagtttgcagtcaaagtgaaaatgtgctgaattccaaaagtgtgagctaggttttagaagttaatcacaattctggaacaaattactagcttaacaaatgagagttcttatgtctctaaaaccaaaatagccctaagtctgtccctcccagtaagatttgggccagtcaatggaacagtaatatacaaatataattacagctgtctaggagcaaactatcctatgaatagataataaaattaagacacttaagccatgttttcatattaaaacacaaagtaaaaaatcattgttttccaaagataaaagccatactgtatcatgacatatatatgcccgatgtttcgaccctcttgaagaattgagattctcgactctacactcttagcgttttctatattgaacagatgtttaatttaaggaggtcaagagaaatcttacacttattttttaatggtaccttagacatagaaggaacctcagaaatctctggctgaatatttccatctgcagatgatcatgtcattaggcttctgactctatagccatagaaaaatattcatgaagacctttcaggaagggaatgttggtatttctaaaaattgagtacaagtattctctagacaaaacagctcttgaaatggcagattgtattcccattattatatttcagaatcaagacattaatacctactttttatttaccaggtttagttatccttgaattagattttataaattaaagaaatagatttcaataaatatttgttgagttcctagtatggaaacatcgtgtttggcaccagggatgttgcctgcaagtataacaggagttcgtatttgtaatgagtttatgatttacagatatttggggggcaaagatatcattcggtaaatacttatgagtgcaaactttgaactagggactgggccaaactctaggaacatatttgatgacagagacacaatccctgtcctcaaggagctttcattctagtagagaagatgaaaaccagtacagtttggtaagttagatgatattggttaatgtagggttcttatgtaagtctagagaagtagcatttaatctgttcttagaaggtcaggaaagatttccctggaggaagtgacatttaagctgagagaggatggataaacaggagtcatctgagtgaacaacagggagaacattccagaaagagaacaaaatgtacgaggcctgatgccaagagagaacattcattgcattggggaactatagtcacttctgtgtggctgggatgtagaatgaaatgagcctggacccaagagagcactttgccctttggggaagctgtaggtattacagtaaggttggagtctggaaagaaaggggtatattgtgagatctgaattgggagaggacagttatatccagacctttatatgctccagtaagaagactgaactttacactgggggccatgggactcactgaatggcattaaatttgagagtggtcatatgaccagatttgcattttacaaagattgtcattgactgcaacatgaagtatggagtattggaggagcggtaaggctggtggcagggagataatttaggaggctttaggtgagggatgataatgacttgccaggtaggaaggagtaaatttcttctcagtggataattagaagattgaatggatggacttggtcactatttggtatagaaggggaaaaaagatgtcaaagatgatgccaatttttaaaaataatttaacatttatttttaaatattttttcagccttattaaggtataatggacaacaattgtaggtatatgtcatttacaacatgatgttttgatttatgtatacattgtgaaatgactgccatagtcaagctcattaacatatccatcactcacataattaacattttgtgtgtatgcagtgagaacatcaggctctactctcttagcaattttcaagtatagattacatttgttaccaactatagtggccacactatacaatagagctccaggacttattcatcctgcctaactaaaactttgtactctttgaccaacatcttcccattcgtctctcctccccatgccaagtttccatcttggtcagttgggtggatagtagtactatctgccgaggcaggttggtagggtgaaaacaatgtgttcccttttggaaatgctgaggtgaccagggaacttccaagggaatctgtctggatctagagcttagaagagatgtttgggctggaaacagacatcaggtattcttcagtatatgggttgtaaatgaagtcacaggagtgggtgatatcaccaatggtgagtgtagtataagaagactggactgaggacagatttccaaggaatttcaatacttaagaggtacgcagagaaaagaggggctgtgaaggacaccaaggaggagactaagagccaggagggaaaactttcaagagagtattgcattatggaagggaagaagagagaacattttaaatgatacgcaatgctcaataatggtatccgctttggagaggccaagtaagattcctaagtacccattggatcaaggtccttaatcttacaaaaacttatgcaaatcaataataaagagatgataacccgataatcaaaaatagacaaggcatataagaagaaaatgaattaaaaatattcaaagcattcaacatatacaaatgcgctcaatctgatatataatgaaagaaaagtaaattaaaacaacaatgggcatgactaaataacagtatgagggagcctgaggagaaggagcatttgaaatttcagtacagaagagaaaaggggtgacttatagaaaaaggagacagaaaccatagaacatgtttggaggataagactcaaacaggtagtggggacccttttctagagtaggatgaaaacaggtaatgtgtgtggatgcaaatatgaggtaggatgtaatgggaagttgagcgaattcatatttagtcattcattcaaaaatacttaattgagttactgctgtgtggcaagcatcattctacaaacagagggcacagtgataagcaagccagtttgtactctcgtgtaacttacattctactttgagaagacagattataaataggttaaaaagtcaataatatgatgtttcagcatcaacaataaaaaattagggtgatatatagagtgccagggaaagtgctttcatggacctcttcattctctcctctcctggtgtcataagctactccttcatccatgctgccatttctcttggtttacggttccagtatagtactcatcacattattactatagagccatccaccttatgaaggtgaaggtgtccatctccttacttaaaaaaaaaaaaaacaaacaaaaaaacaaaaaacccgaaaaacaaaaaaagaggcagaaagacagaaggtcctccactaactttcacgtgccatgtaaccagcgaaatccaattattttacagcattctagctatagaagagtttgggaagcgtagtgcttagtgttctagcctttgtagcacaggaaagggcctggaaggaaaggaattgtgtcttccgcagttgcttttctttatggggaagtgctatagcccaaacaatattttaggaattttcatctattgtcaatatgcaaactggaaggggataatgaaaatgttgtggttagaagtttatgaaatattgttattcacattttaaagtaaaaagagggaatgtttaagagacttgtttaagatcacatgtctcataattggtgggaccagcaatacaatccaaatctaactacttatctttttgctatgccctattagtgttcatattagaaaagaaattctatctcagacactaatgatttgttctttggacaccaatgactttaagttaaaacttcatactagttaatttaattatggtgtagcagtattattaaactatcaagactataaattttctatttgtaaaggagattatgataccaaagattagtgaactaatgatattgagaattctatgacataattttgaaaaatatttgcaggatatttatttttgtgtaaatgatgctttcaagctaccataatcctaagtaagtgtatatttgggaaaaccacctattctaacacacttgaaatttaaataagtcaggaaatttttttccagatcttctcccaaattatcttcatctttttcctctccccttgggaaagaatctcttcatgcctcataatatcaaatttaaactatggaagtccaggtggtggacagtcagcaaaggggaagatgagaagcttgtgttataaagccagctcttgtcagaataaggatctggtaggaacttcagaagtgatgggtaggtaagtatgaaggccaggtcctaagatctaaattacaaagcagaagacttacttaccagggagctggaaaacatgttaggaaatccagagcaggaacagatttcaagatagcacaataatatagcagtgaagtactgagaaaagagtttttttcacgggttggatttattctagcattttaggcagcatttgggcatttctaagtggtcagacttagaggagatagttaaggaattagcagctgctaaatgccaattcttagaccagttgaatcaaaatcatctaaaaagctttcagaaaccagactttttaagggccatttgagagactctcaaatctggaatccagaaatctatagctagatgagtttaaggtagagccagaataagaaaaataaaatagtttgtttgtttcaggtatcttttccaatattatttccgaacctaccccaaacaccttaaatcactgcattctatagccattcttttaaaaatgcttgagttattagttttcaaaaacaaatacaaatctgcacacatacagaaataaacattaaagagacataaagatattaaacagagttacatatacttacaacttcatacatatatattatatataaaactgaatattaagtgtttgatattagtgacaaaatctgtaacatccattatattagtgctttttgtactttttgttgggtgtagtaaaaattgcattcgaatttgagttttctgctatatatttggtcagttcctatcagtgaaggaaaaacctttttttattattttattgtttttttattttttgagacggagtcctgctctgttgtccaggctggagtgcagtggcatgatcttggctcactccaacctctgcctcccgggttcaagcgattctcctgcctcagcctcctgagtagctgggactacaggcacctgccaccaggtccagctaatttttgtatttttagtagaaatggggttttgccatgttggccaagttggtctggaactcctgacctcaggtgatctgcctggcttggcctcccaaagtgctggaattacaggtgtaagtcaccacgcctggcccctttttattttttaagctgattgaagattcttagttctcatgctttctagtggtgattaatctttagccaatatttctatatacagttattagtaatcatgtttgacttaggtcaacaaacaatctttcctaaaaaaacagaaccccaattttaatttctgaattatttagtatctattttctgctgtggaagttgaattatgttgatagatatcatacagggccatgtaacactctcagatacacgttcacatgtatagtagctgtatacaaaaatgttacttcattctctctctctttataatactcttggctctcttacgttctctcacacactctactcttcccttcctctgttctttctacttgttccctctgctcctaccacacttattccccccttgtccattttccttgtgcataaagcacaagtgcttagtaattatcaaatattaataacaatgacactaaccacccaatgatttagtgttaatgacatgctttattgaatggcattacctctaaagttcatgtttcctttacccaaccaagcttcttaccctcctcccttaccacaagcatctatattgtcaaggttgttataaagagtaataagccagccattaaaaaagggtttatggtattttcctatctacaaagtcacaggaagctcaaatgtactcagtaaatattgcaaaattacacaggaccattaaatgtaacactccaccctttctctctctctctctctctcttgctctctctctctctttctgtcaatatagcaacaccctatatcattgccctttgtatgtgcaaatcagagttaataagctttatattagcaattactccttaacaacttctggtttgtttggtccagttgaataatgtaagcacttaaaaaaatgaaattataaacatttatgtgaaaagtgcatatatcacattggatatgttgttatgcactccttaataataaagtaagttaatctttattgcacacttattataatattactttgaccctctctagtactctttatctaagtattctcaagtgctttacaatctcaaacagacccaatgtgttgtatacacagaatcctttgaagctgacatttgcctttctgaccagcttgttgtaaaggaaatcagccaaaaaacaagtatctagatgagtagctcaaacattagtacacatagtaatcacaggtcaaaatgcagatagattaccctgtccaaattctcctgagtaagagtaggtgaaacatttttaaataagctccccaggtgattctgaaattggtccaaggaccacatattaagaactaatgatccaaacaatttgactttttattgtagattaaaccatgctgagaaaattattaaaaattgaaatggcagtggaggatggtttgaaagaaaggtttttcagggccctttcaacaataaaattaattgaacacaatattaaaactctatatttgatttaagactaaggttttcattgtttttaaatctcagtaatttttatgtaacaggtcaattcatacccagcatcttaattccaatgaatgatttcccacaacaatttttgtggataactccaagggaactcgaaggaagttgtagtatgaacaaagagaagtagaatttgtccctgtgtgtaaggcttctctgataagcagcacaggctctcatactgctttttaaaaaaattatgatagcatcaagtggaattaattttttttagattatactttcatggaagggaagatctactgtgaaggctggaaaaccaacacccttaagataaatatattaccagatttgagcgctcttagtaatcagcaaagataaatgtttaacagtgcatacaaaatgaagtgttttatgttaaatcaaatagagaaagccaaacactaataatgtggttacaaatgaacaataaattaggtaatcagaacaggtacagacattaatagcaggatattggtattattaatgtattttgttttaaaataatgaacttaattacaattctcctcatcctaccccactattttattttattccagattcagcagcttcatattatgtctctgaaacacttattattaaagttatccaaatgtacacatttctctttatataaatgtttcagtccagaaaaggaggccaaatacattagctcagaacatcaaatcttctcagatgtgggaatcttttattttcacacttttaaaggtaatctgtatttctagcgtctattatagacagaaaactttcatatgacaacattcctattttcttaactgccttgataggggcgaagacaaattctaagtaggactttttaccccattcttcttaccatcattctttcacaaaacccccagctttagacaatcgctattatgaatttgacatgtactattccaatccattcccataaatttacacccatatatacatatagttatctatgaacaatatttagtagcttttttgtgtgtggctttaaaatttacataaattgtataatttgtgcacattcttctttaatttgccttcttggctacggttatctttttgagatctagctatgctgctggtatgtagaattctatttcattcttttttcattgttgttttgtacccataacgtgtcacattttatttataccttctgttcctgatggacatttagattcttccaggattttactcaatactgcaatgaaaatctttgaatttttctcttttgcacatattcaagagacttttctgacatatatatctataggtgaattgtgtagtcatatgatacatacacacattttaaatttcactagatactgccaatttgccctttgaaatagccatacaatttatagtaccaccagccacttatgaaagttcccatttcctcaaatctttgaaagttcttattataaacagacatattaattcttgccattctgatttgtaaatcagaatctctattgttctacctctagttctaatttggaattccccaattacttgtaagatgctatatattttcatgtttgttagtcattctgatttcatatcctttaccaattatctttttggtaagttattgtggtggccatgagatgtgccttacagaggccttgctagagggaatgtgattgaatgagagccccagatgctgtgtattaaaatcctgcactgagtttgtctcaagatttcttgcacgtgaatgaatgagtacagctgggatactaaagcagatgtgtatttgggagatatgagacttctttagtggctgatttttggctcataaatgactttgccaaaccttccttagactgctcagtgttctaacatcttccatccagccttctacccttctttcctttactaggggattgaatttacattgaggtctcatagccttctctgcctctctccttatttccttttatacaaatatttcccctaataaatccatgcacatttaataccattttgctatttgcaacctgcaggtcctggactaacacagttctatacattgcattaccattctctagagtgggatcttttgttgtagagagttttaaaatttttatgtagtcacttttatccatatttttctttatggtttatatttttgtgtcttctctttaacacatcttttctagcagaattcataaatatattattctatattgccaaaagtttgaaagttgcaatcattagaattaatttttgtatattgtgtaagttaagaatctaattttattgtttttcattggaaagccatttgtcccaagataattttttagtagtccctccttcccctattgtcattctgacatattttttctaggttccgatctatgcatgtgtttctttatggaagagttggccctttgtatctttgagtttcaaatccatggattcaatcaaccacagatagaaaatatttagaaaagcgtcagaattgaacatgtacatacattttgcttgtcattattccctaaacaatatagtataacaactatttatgtaggatttacattgtattaggtattgtaagtaatctagagatgatttaaagtatacaggaagatgtgcatatgttacatgcaaatactaccccatttatataagggtcttgagcattcatggattttggtatccacagagagtcctggaaccaattccccacagatgccaaggcacaactgtatttattctatcatctacttgtttaatctcacatcagtatctacttttgaaataacaataactttattatttaactttttttattacttaggattagagaatttcctctggtgaggcatcatagtgtctcaagctggccataaagacaagtgagggctaggatcggtaagactgggcagaggaagatacaacagatctcctatgcatgaagcaaaagtgcagctcagaagccagctctttcattaagttgtcctctataccctcactagattgtaagctcttgaaatgagaggctataccttaattgtctctgttatctaaaatacttccactcactgcttggaacatattgcctgcaataattaagcttgccctggctcccaaagcatagagcaaatcacactcctccccttgcctttgagaagctcacagtcttcgaaggtagagatatgtgaacagataagaaaatggatgacaggagaacagaaacgcatgactgtcagagaagtcattggagactttacagaggaaattaaatttttattgatcttgaaagagtttgccagatgaagtagaggacaggcattttagacaaagggaacaggaaatgtgaaaacacaaagtgatggaagtcatggtgagtttggagaactataaaacttcaatgtggctgaagggtaaggtggatatagaggagtgctgggaggtgaggctgaagaaataagctaggaaatgtctttttatgccattttttaaagtttggactttattctgaagttcacatggatccaatattttttgttttgtgttgttttaagcagaagcgtgacatgatcagcttgaatgatgaacaacttgaattgtttaaagtggatcacacagtctactgttttacagttattctttgaccaagatattctttattaactgaggaaaaaaagggctttcctgaattttgcagtcatgggatatatgataagcattcttgatttatcatcttcaatcctgttacataacataataaccattgttattacctttagcaatgctttcctcagtattatctaatggcctataaaatgtgactttcatttgcaaatacagtacatctaacaagaacttaccacagctgctatgcaaaataccaatacaattgacccttggacaatgtgggggttaggggtgctgattccccatgcagttgaacatgttacataacataatacataaccattgttattatgtaacaggattgaaaatgataaatctttggaaagtggggcaaatgaattcttatgaattccatatcttccacatgtgttttacttttttgataagaagtagtaacctagttcagaaagaaaataatcatccccttttacttatgcaggataccaagtctatcttagcaccataatagtgaatgataggaatcaagctctatgaatacattcacatgtacatatatatggctatataggacacatgcatgcacatatacatatatacacttgcatatatgtgtatatacatgtacatatatgcatgtatattcaattgtatatgtgtatatagccaagttattgtacagttgacctttgaacaacacgggtttgaactatgcaggtccacttacacgtattttttttttccgtttctgacacccctaaggcaacaaggccaactcctccccttgctcttcctcctcagctgactcaacatgaaaactatgaggacgaagacctttatgaagattcacctccacttaatgaatagtacatacatttctttttccccatggttttcttaataacattttcttttctctagcttgctttattgtaataatatagtatataatacatataacataccaagtatgtgttaattgactgcttatgttatcagtaaggcttctggtcaacagtagactattgctagttaagtttctggtagttacaagttatatgtgggtgttcgactgcatggggagtcagcaccccaaccctcatgttgtccaagggcgttgtccaagggtcagttgtaattggtattttggatagcagctgtggtaaattctggttagatgtactatatttataaatgaaactcacattttataggccattaaatattattgaggagagcatttctaagggtaaaatcttgtctaatgcttgaaacatcttcattttcctgtcagtttagatctttttgaagtaattctgaaaatctctcttttaagctaaatttaacacaaccaaatagccaaatatttaagttccactaatgaagatatctaaatttctgttaaaaatttaagatatatgttaaacccttctaatataactcttctctcagtcaaacttttttttttaacagttgctttgcttcttctttcaaagtcatacttcaacaaagttgctattgaatatgtctgactaaacatgttagctatatgataagatggctggataagagataaatatagaaaatgtagctttttttctacttgcaataaccctttaggaattaaaatggaaaactaataactatttgattcataatagtagcaaaccgtaaaatatttagacataaatctactaagaaatttataagacatatatggagaaaattcaattgaataaaccgttattgaagtatataaaataagatctggatgaatagaaagatcataatttttaataaaattttgcatcttaaaaagtgaaccctctccaaatatatgcacatttaataaaattataaatacatcccaatgaggttggttttgaaattttgttaattggaacttaaatttcacctaagaagaaaaaataaagaatagttaagagtgcatgctttgtagacaaattgccttagttagaatcctggctctatcatctattagctatgttatctttgggataacattcatcttttcttatagatatgcttaaaacagtgcctgacatatagtaagcacaaatatccattagctattcttcttattatttatgttattagtattgttaatatttgttattatatggaagactaaatgaccaaagagagtcaagaaatttatgaataagatttatgcgttgttagatattagagccattaaaaaaaaaaaaaccaaagtgccaaaaaacctagcacagtgttaatacaggaataaaaaaatggatcagaggaaccaaacagaaaagccagaaatggatcttaggaaacatgagaatatgatatatgatagatgctaaatgaattcagtataaaaatattaatgtaataaatcatgcttgctattcaagtaaaagaaaatgaggttagattcatgtctcataccaaatataaccataaattataccttgattaaattttttaattaaaaagcaataatatttgaaaagaaatataggatactcaatgtataacctgaaggttgggtagtacttttcaacaaatataggaatttttcacttgaaatactagaagaaaaaaagatagcaaacaaatacaggaattccaatttcaagcagatataatgatttcatgaaatgttaactgtgcacatgatagatggtctatggatagtgcaaaagaaaaagagaaaagaaaaaatgttttttaacatatgcagcaaaaaaggtttttaacatctattacatacaaataaaaatgaatgtataacacagacttcaataaaaataggcatttcacaggagaacaattcagatggccagtatttacaatttcataggtattaaggaaaatacaaattaaaatggcaaattagcaaaaattgaggtgtgattatattaatatctgttggtggtggtgattatggggaaaagggtactttcaaaacttgctaatataaatataattcttttggttgttttgtaaaggaacctgacaatatcttttaaaaataaagaaaacgcatacttttgacctagccatcccattcatgagggtatgtcttagaaaaataagatcacaaaatcatagagatttatgtgcaatgatattattggtaggtcatttttatgaggaggggtgtggatagtaaatgccagggtaaatcacatagcatctaataaacgtatttatgaactacaaaagcttacactttcagtctagtctagtccagactgcaaataaatgtgagcaagtgaattcaagcacagaagtgcttgaaggcaggtttcataaatctactttcttacagtatcctgatattgacttatcgagacagttactgtggggttgattattaaaatatttatgtatctaggtatttttcattcagtagtatgttattcaattagcaacaagtgtggggatttaaagatattcttgtttgtttttactgctgaaacatattctagtggaaatttcgaataaacgattagtcatcctaaaagcaagatacattttctcagaaaagacaaggtaaagaacttgtatatcctccctcaattcgtttataaggtaataagatgaataaaaatatcatagtacaatttagcattgtaaaataaaattaattggtcatctctagtgtggtcgtgcttggaaggtgaaagaagccaagatcttgtctgggaatatcatgtctaccttgacctcacccttaagaatcctagcctttagtttaaaatcacatggctacatacataccaacttcaacaatagtacatctggcaaggtcatgcaaacctgggacttgagcttctgattctaagtccagtgctttttgtgtacatcatctcttgtacataccttatgatgatatgctaataaaagctacgtgatcaggccttaaaaatctgctttttttttgtaatggtagaatggggcatattatcacatcaggtaaacactctattcaaggataaatggaaatgaatgtcatatatagatcattgataaatatctcattacaaaattatgagagttaccaatgtttgagtgtatattatgggccagccctttatattaaattacttcaaatttttacaactgttaaaggaagatattattatacccattttatagatggacaagttagggccagaaaagacttcctcaaagctgttagtccagtaatggagacagggctagaaaacaggtcattttgctctttgactaatgttactactcatgttttgtattttgtttaaagttttattttattttgctttatttattttttgagacaagatcttactctgtcacccaggctggagtgcaatggagtgatcacggttcattgcagccttgacctcctgggctcaagcgatcctcccacctctcaatctccagagtagctaggactactacaggtgtgtgccaccatacctggctaaattttgcattttttgtggggacagggtttcactatgttgcccaggctggtcttgaactcctgggctccagcgattcacctgccttgacctcccaaagtgccagtatcacaggcttgagccaccatgtccagccaagttttattttagaattaaaaaaaattccacttggattgttacattttatctcattgctttatatttatagaattactttataaatgccactttcttaattttcatagttagcactctttatgaaacataaactattatttgacccaggtttttgttagaggaattgagtcagagagctgttaagtaactgagatttcacaataagccagacagaccagggttcaaattctgggtctcacattatccaattcaatattccagctttgttacttattgagcaaccactacaagcacagtttacatgacatctgatagctctcaaaatgaattttacaaacataattcagatttcaactcagcagtgactcaggagaaaggacacttggatgcatttctttatggcatttttcccagggtacacgcaacctggaagatctcccaagtatgggggaaggtttcaccctgaggaatcccattccctctaatctgggacaagggggaggagagtactgtctcttatcagccatctccccagggaggcctgggccctcctggaatgcataccatggcttactgactcaaagtgttgaaaagaccaggcattgggacacacaacactactcttaaaataaaaaaagaatcagagtagcttgtggttataattgaaatggacagagtaacatggtaccaagaaactattagcaattccttccctaaatccctcattttcttaaagcattttctccttttcctcaacaagctttaagttggatttgaagaatgataagactaaaaggagggctgtttctggtctttggaggaatttgatattccattcgatctgagtgtgcaaagcctgagttcacatgaactcttctgatctctttctctaatattttttcaccttattcatatgggaaagaaggaggggaatactttagttccattctccctcctcctatttccttgacttgtttaaaatataaatgttatagacacctaagatagaaatttgactgaaacagcctcttaattattgtcttaaaaaattggtataatgaaattgcatttgtagtctttggacatttaaatccagaagggatattttctttttcttttttaaaaatttaattcaatagtttttgggctacaggtggtttttggttacatggataagtgctttagtggtgatttctgagattttgatatacccatcacctgagcagtgtgcactgtacccaatatgtagtcttttatcccccccccgctccacccttcctttatcgtccccaaagcacattatataattattatgcctttgcagcctcattggttagctcccacttgtaagtgagaacatgcgatatttggttttccattcctgagttacttcatttagaataaattgtctctagctccattcaagttgctgcaaaggccattatttcattccgttttttggctgaatagtattccatagtgtatatatgccacattttctttatccacttgttgattgataggcatttaggttggacccatattttcgcaattatgaattgtactgctgtaaacatgagtgtgctttttttttttccatataatgacttcttttcctttgggtagatacccagcagtgggactgctggatcgaatggtagttctccttttagttctttaaggaatctccatactgttttccacagtggttgtactagtttacaaccccaccagcagtgtaaaactgttccattttcagcacatccatgccaacatctattattttttgactttttaattgtggctattcttgcaggagtaagatggtatctcattgtggttttaatttgcatttccctgataatcagtgatgttgagcattttttcctgtgtttgttatttgtttgtatatcttgagaattatctattctgtcctttgcccactttttgatggaattatttgtttttttttcttgctgatttgtttgagttccttgtagatcctggatactagtcctttatcggatgcatagtttatgaatattctttcccactctgtaggttgtctgtttaccatgctaattatttattttgctgtgcaaaagcttttcagtttaattatttcccatctatttatttttgtttctgttttatttgcttttgggatcttagtcatgaactttttacctaaaccaatgactataagagtttttccaatgttatcttctagaatgcttatgttttctggtcttagatttaagtctttgattcatcttgagttaatttttgtataaggtgagcattgaggatccagtttcattcttctacgtgtggcttgccagttttcccagcaccatttattagatagggtatcctgtccccactttatgtttttgtatgctttgtcaaagatcagttgactttaagtatttggctttatttctgggttctctattctgttccattgtctacttgcctatttgtgtaccagtaccaggctgttttagtaactatagccttgtagtataatttgaagtcgggtaatatgatgcctccagatttgttctttttgcttagtattcctttagctatgtgggctcttttttagttccctatgaattttaggatttttttctagttctgtgaagaattatgatgatattttgatgggaattgtattgaatttgtagattgcttttggcagtatggtcattttcatagtattgattctacccatccatgagcatgggatgtgtttccatttgtttgtgtcacctgtgatttctttgagcagcattttgtagttttccttgtagagatctttaacctccttggttaagtatattttcatgtattttagttttttttttttgtttgttttgttttgttttgttttgtttttgcagctgttgtaaaagggattgagttcttgatttgattctcagcttggttgttgtcagcagggacattttctaaagtatagactgtagttccttatcttctatctgtttcttactgtccccttcagtattcttgtccttttttcccgctattatctttttgaccttttaatatatagatatctacttctacttctgacaatttttgcttctccaattttctttctttttctcctctgcacacatttatttattttcttctatgtacttctttatttttaacttaatatttgattaacttcccttccctgtctcttttccttctttccataaatcttcattaattgcctgcactgagctaggattctatactctctaaatcaataatctattttctatagtcaactgtgttataatcgtactgtcaagataactacttatttttaatacttaaaaatattttgaaattttaaccaatttaattaatacaatgttgagttcaaatttgaaaaaaacaatggaaaactgtaataattctagcaacctcctgctttttaataatgtattagaaaatttgcctctttttcaaaagcctacagtgaatctattcatacaaggcaaaagcaaaccattctcttcattctctttttttctccaaaagatttaagtgttttttgtttgtttgttttgttttgttttttagatattgagtcttgctctgtcatccaggctgcagtgcagtggtgtgatcatagctcgctatagcctcgaattcctgggttcaagcaatcctcctccctcaccctcctgagtagctggggctacaggtgcatgctaccatgcccagctaatttaaaaggaaaaaaattgtgtagagatgggtcttgctatgttgcccaggctggtctcaaacttccaatctcaagcatttctcccacccagcatcctgaagtgctgagattataagtgagccactatgcccaaccagatttagtttttaaaaagagaatacgatttgaaaaaggaaaaatgtgaggcaggagagaagaaatacacacacgagctgttttgtaattgctgtaaaactgaaatcttcagcctcactaaaggagcacttgcatgaacacctctaaattaccttattaccttctaaattaggtgtgaagtctaacttctaaattatgagtgaaatccactgcaattcttgttatttggatggaatcctaggtatgtggtccagttcatgagttgaacaaaagcatgctcatttaggccaggtagaaagaaataaagacctatgttttacatgtctcataaccactgaaggtccttctcataagcagtgcttatgggtattaacgacctctctatattttacttctccagtgcctaagtagccgagtccactgagtcctgctacatctcctccaacatgtcagcatttttttcacaggccttttgttactctagatcagaaatgttgatagcaacagttccttgagggcagcagctagcatgatgccagccaacaggaaccaccaaatggttcttaatataaattactacttattaatctatttactttgtgcatttggagttttgcatgtaaagtcctatttatgtccatatggtagataaatggaacaaatgaataacagaagtaaccattttgatactttagatatagataatattggattatttctggattgtgaaagaagaaggaagaagcatatggaagagaagttttagtagaggggaggaaggaggaggtggaaacgaatgtacaaggatgggaggagaaaagggagagagacttttttttttttaaggcgagagtttactacctatctaactcttcgcattcttgaagtctcagaccaaatcccatcggtttgaaagcctctagggtattctatctattgtatacttctgttatgtacaaaattaatttgccaattaattgtgaactgttttataaactatcttaaaatggttagttaaatctttgggatagtatttagctttctccaggattatgacttaccttctaaattagacatacaatgcctaggagtcaaggactattttgcataaattccagtcttcttttacaatgcctagaatgattgttaccacagaaatattcattacctgggagaaaggatgacaggaggggcagaatgaatggagagaggtcgtgagaatgaggtgctgaggatggacgaggaagaaagctgttttagttgggaggataggtgacagaagcatggaaaggaattgccttggacccatggaagcccagtgaagatacttagatcctgcaggggtgtgaataatgttcttttagtttctcttcttaggaggtttgttcattttgggagatttcttttgaaaagagtgaacttaaattggagaaaagtacattttagtatgttgataacatttgaatttgtaaaatggacctatggatgatctacacatatttatatacccataaatatacacatattttaatttttggtattttataattattatttaatgatcattcatgacattttaaaaattacagaaaaatttacatctaaaatttcagcaatgttgtttttgaccaactaaataaattgcatttgaaataatggagatgcaatgttcaaaatttcaactgtggttaaagcaatagtgtgatatatgattacattagaaggaagatgtgcctttcaaattcagattgagcatactaaaagtgactctctaattttctatttttggtaataggacatctccaagtttgcagagaaagacaatatagttcttggagaaggtggaatcacactgagtggaggtcaacgagcaagaatttctttagcaaggtgaataactaattattggtctagcaagcatttgctgtaaatgtcattcatgtaaaaaaattacagacatttctctattgctttatattctgtttctggaattgaaaaaatcctggggttttatggctagtgggttaagaatcacatttaagaactataaataatggtatagtatccagatttggtagagattatggttactcagaatctgtgcccgtatcttggtgtcagtgtatttgtttgcctcatagtatagtttactacaaatggaaaactctaggattctgcataatactggacagagaagatgtaaatatctgttagttccatcatagaccctgccactccaatgtacacaccagctttaggcttcttggtatagataaacatacattttcaaaatttttcatcataattttcataacaaaataggaaggcaaatgatgtcacttggcttaaaatctataatatttaaaataaacaggacaaatgcattaacattgttgggggaggaggtcccttagtagaaacactcttggtccaagcattttaaagctgtcaaagagatgtaaatatagataatgtatgtcaaggagagagctttgtggttaaactgtaactttcagtttaaacaattattggtgactctgatgtcaaatgtttctcaagctttatctgaacaaaattcttctcactttgttgccaaagtcgttaacaagaaatcacattgactcattgatgttttggctcctttcccttactttctgttgctttccaaaagctgagacaggaaactaaccctaactgagcacctgcaattgcctggtagtattctagtcatgtgtgtacttttgtgtgtatgtaatccccttacagctctgcaaagtaagaattgttctccctgctttacagaagagatcataagataattgaggctgttagatgttaacttgccaaaagccatacaggaaaatggtagagtcacagtttgaaccaggtccttttgattctttacattaaaccatgctttgatcttggaaatacactgtaaggcaataaatcaatagatacggataattcacaggcttctaaataaatggaagttgattgtttttatctgtgagccaaagtaagacttattctaagaattccacaaatttagataagatagagtatatggcttctagacatccaacatagaactgagtttgtgttatcagtttaagatttggttttgctgtaaggtgcacacactttgaggaactaaaaataattgtctgttcttattctgatcagaatgtgtaatgtgttgtccagttttggatgatgaatttcttatttctaatctcataagaaacttgtcatagatgtgagggagagaattaagaacagagtgtggggaagaaactgtgtacattttgatgggatccattatgtagctcttgcatactgtcttcaaaaataagttacactataaaggttgttttagacttttaaagttttgccattggtttttaaaaaaatttttaaattggctttaaaaatttcttaattgtgtgctgaatacaattttctttattacagaagtaccaacaattacatgtataaacagagaatcctatgtacttgagatataagtaaggttactatcaatcacacctgaaaaatttaaatgttatgaagaaattatctcatttctattaatatgggaactgtgtcttcatctttattactgttctaaggtcaactcaatgtagattttacttgcttatggtttcatattttagctaaatagtaaaataatatggatatacattttgttgtgacttactcatactttccttatttggaacttttatgaatatgatatagagactgaaactacaaggaacaaaatgcaatatcaattatacagttgtggcagcactgctatcaatttgttgatagtggttaacacttagaaaaacattttaaaaataatttcacataagtaatgtaatttattagctgtctctgacattttacagtttggaatagtttattttctttttggtgtcctcaccaaaacccaacatcttcaagggcaggaactgtataatttttgccattgtattttgagcacatagcatggtacttgcctctaaatagatactattgttaaaatattttttaaggtaatattttaaagtgtatgctatggtacagttcagtttgtgacttttgctagtttatgccacttacagttagcaaaatcacttcagcagttcttggaatgttgtgaaaagtgataaaaatcttctgcaacttattcctttattcctcatttaaaataatctaccatagtaaaaacatgtataaaagtgctacttctgcaccacttttgagaatagtgttatttcagtgaatcgatgtggtgaccatattgtaatgcatgtagtgaactgtttaaggcaaatcatctacactagatgaccaggaaatagagaggaaatgtaatttaatttccattttctttttagagcagtatacaaagatgctgatttgtatttattagactctccttttggatacctagatgttttaacagaaaaagaaatatttgaaaggtatgttctttgaataccttacttataatgctcatgctaaaataaaagaaagacagactgtcccatcatagattgcattttacctcttgagaaatatgttcaccattgttggtatggcagaatgtagcatggtattaactcaaatctgatctgccctactgggccaggattcaagattacttccattaaaaccttttctcaccgcctcatgctaaaccagtttctctcattgctatactgttatagcaattgctatctatgtagtttttgcagtatcattgccttgtgatatatattactttaattattattatacttaacatttttatttactttttgtgttagtattttattctgtcttctccttagatagtaaccttcttaagaaaatatatatgctaagtgttttactggtttaatatgcttagactactcatctacctcaatacttccttggagatctcctcctcagtcacacagagctcaggacttatatttccttggaactcctgttagggtccaatgtacatgaaattccctagacagacagacagtcagttatatggcttgatttcaaagtttcaaaatgatttaatggactatcaagtagtttattaggagaacagttattatactcttctaaaaataaagactttaagcaataaagatgtatatgtatataaaatggctgggttattcctagaagtacctttcttagaatttagttaaatttaatatccaagatactatcttttcaaccctgagattgtgaaaagtaacttctatcaatataaactttactacatttgtattgtgttagtgtgttacagtataatctagaacaatgtgtctttctatatgatatatgacattttaatgcctaaaaaaactgatatgtcttagatgattctagtcaggatttacttctagaatagattaaaattctatttgaggagagtcaaattaattatcgaattctcagttgttattattgctgttttatttttagtgaaacagattagtcttaatgtaaacacttgagaaataaattgatggtcaacctaaaatgtaaaaaagaaattaatagaaaatttaaagagcaacaaagctctgacatttaaaagaaatgaagtacaaatctctagggaccttaaagatcatctaataatttcctcattttctagataaataaactgagagaccccgaggataaatgatttgctcaaagtcaaatatctacttaatataggaaatttaatttcattctcagtctgttaacatgcaacttttcaatatagcatgttatttcatgctatcagaattcacaaggtaccaatttaattactacagagtacttatagaatcatttaaaatataataaaattgtatgatagagattatatgcaataaaacattaacaaaatgctaaaatacgagacatattgcaataaagtatttataaaattgatatttatatgtttttatatcttaaagctgtgtctgtaaactgatggctaacaaaactaggattttggtcacttctaaaatggaacatttaaagaaagctgacaaaatattaattttgcatgaaggtagcagctatttttatgggacattttcagaactccaaaatctacagccagactttagctcaaaactcatgggatgtgattctttcgaccaatttagtgcagaaagaagaaattcaatcctaactgagaccttacaccgtttctcattagaaggagatgctcctgtctcctggacagaaacaaaaaaacaatcttttaaacagactggagagtttggggaaaaaaggaagaattctattctcaatccaatcaactctatacgaaaattttccattgtgcaaaagactcccttacaaatgaatggcatcgaagaggattctgatgagcctttagagagaaggctgtccttagtaccagattctgagcagggagaggcgatactgcctcgcatcagcgtgatcagcactggccccacgcttcaggcacgaaggaggcagtctgtcctgaacctgatgacacactcagttaaccaaggtcagaacattcaccgaaagacaacagcatccacacgaaaagtgtcactggcccctcaggcaaacttgactgaactggatatatattcaagaaggttatctcaagaaactggcttggaaataagtgaagaaattaacgaagaagacttaaaggtaggtatacatcgcttgggggtatttcaccccacagaatgcaattgagtagaatgcaatatgtagcatgtaacaaaatttactaaaatcataggattaggataaggtgtatcttaaaactcagaaagtatgaagttcattaattatacaagcaacgttaaaatgtaaaataacaaatgatttctttttgcaatggacatatctcttcccataaaatgggaaaggatttagtttttggtcctctactaagccagtgataactgtgactataagttagaaagcatttgctttattaccatcttgaaccctctgtgggaagaggtgcagtataaataactgtataaataaatagtagctttcattatttatagctcgcaaaataatctgtatggaagtagcatatataaggtatataaacatttagcctcttgataggactaactcacattctggtttgtatatcagtcttgcctgaatttagctagtgtgggcttttttttatcttgtgagtttgctttatacattgggtttctgaaaagatttcttttagagaatgtatataagcttaacatgtactagtgccaatcttcagacagaaattttgttctattaggttttaagaataaaagcattttatttttaaaacaggaaataatataaaaaggagagtttttgttgttttagtagaaaacttaatgccttggatgaaatgagccatgggcagggttgtaatgaattgatatgtttaatagtatagatcatttgtgaataatatgacctttgacaagacacaagccattaacatctgtaggcagaagtttccttctttgtaaaatgagggaataaaatagatccctaaagtgtgtaattttagtatttctaaactttatgaaggtttcctaaatgataattcatctatatagtgtttttttgtgtgtttgtttgtttgtttgtttgagatggagtctcgctctgtcacctaggctggagtgcaatggtgcaacctcggctcactgcaacctctgcctcctgggttcaagctaatctcctgcctcagcctcctgagtagctgagattacaggcatgcaccaccatgccgagctaatttttgtatttttagtagagaaggggtttcatcatgttgaccaggctggtcttgaactcctgaccttgtgatccacccacctcagcctcccaaagtgctggtattacaggcgtgtgccaccacgtccagcctgagccactgcgcccagcccatctatatagtttaatatcaatctaaatgaatttctcagtcctgagcctaaaaatttagttgtaaagaatgatatccttgactaataatagtttctattaatggattgcatctagtgctaggtggcatatatttagtccccacaactaccctggaaggtatttaaaatttttcacatttgcagataaggaaactaaagttcagagttcggcaacatgcttgaattcaagcagctcctaggatgttaatggtggaggttgggttcaaatccagatctgtctgactcaaaaaatgcatactcctaaccagtgcactatatcccaattccataggagcccttctttgtgattcatagcactttcccatgagttttgttgattttgtgagaaacaaaactctttttcctttggactgtctggaatctctctttttcaaatttttgaaatgtatttctatgccaaaagacaaagatttctagaggaatatgcctaggatgagaattatgtaatttaaatcacagctggaaagagagaaagtcctaagttactaagaaatgttcaaacacaaatgagctttcagtctattggaagacctttatagctagaagtatactgaactgtacttgtccatggacccctgaagaaacaggttaaatcaaagagagttctgggaaacttcatttagatggtatcattcatttgataaaaggtatgccactgttaagcctttaatggtaaaattgtccaataataatacagttatataatcagtgatacatttttagaattttgaaaaattacgatgtttctcatttttaataaagctgtgttgctccagtagacattattctggctatagaatgacatcatacatggcatttataatgatttatatttgttaaaatacacttagattcaagtaatactattcttttattttcatatattaaaaataaaaccacaatggtggcatgaaactgtactgtcttattgtaatagccataattcttttattcaggagtgcttttttgatgatatggagagcataccagcagtgactacatggaacacataccttcgatatattactgtccacaagagcttaatttttgtgctaatttggtgcttagtaatttttctggcagaggtaagaatgttctattgtaaagtattactggatttaaagttaaattaagatagtttggggatgtatacatatatatgcacacacataaatatgtatatatacacatgtatacatgtataagtatgcatatatacacacatatatcactatatgtatatatgtatatattacatatatttgtgattttacagtatataatggtatagattcatatagttcttagcttctgaaaaatcaacaagtagaaccactactgatattttattatttcatattacatataaaatatatttaaatacaaatataagaagagtttttaatagatttttaataataaaggttaagagattcgaaagctcaaagtagaaggcttttatttggattgaaattaaacaattagaatcactgttgatattttattatttcatattacatataaaatatatttaaatataaagataagagtttttaatagattttataataaatgttaagagattaaaaaactgaaaatagaaggcttttatttggattgaaattaaaggccaggcatggtggttcatgcctgtaatcccagaattttaggagactgagtggggaggattgcttgagcccaggggtcaagaccagcctgggcaacacagtgagacaccgtatctacaaaataattaaaaaattagctgggcatggtggtgtgtgcctgtatgctaccattaactaaggaggctgaggtgggagaatcgcttgagcctgggaggtcaaggctgccctgaactgtgattgtgccattgcattccagcctgggtgccagagagagaccctatctctaaataaataaataagtaaataaataaacagcaacaacaaaaacactcaaagcaaatctgtactaaattttgaattcattctgagaggtgacagcatgctggcagtcctggcagccctcgctcactctcagggcctccttgaccttgacgcccactctggctgtgcgtgaggagcccttcagccctcccctgcactgtgggagcccctttctgggctggccaaggccagagccggctccctcagcttgcggggaggtgtggagggagaggcgctgggggaactggggctgcgggtgccttgtgggccagcgcgagttctgggtgggtgtgggctgggcaggccccgcactcggagcagccggccggccccgcgagccccaggcagtgaggggcttagcacctgggccagcagctgctgtactcgatttctcactgggccttagctgcctccctgcggggcagggctcgggacctgcagcctgccatgcctgagcctccccccaacctgccgctgcagtgggctcctgcgtggcccaagcctcctgacgagcaccgccccctgctccacggcacccagtcccatagaccgcccaagggctgaggagtgtgggtgcagggcgcagggctggcaggcagctccacctgcagccccagtgcgggatccactgggtgaagccagctgggcttctgagtctggtggggacttggaggatctttatgtctagctaagggattgtaaatacaccaatcagcactctgtatctagctcaaggtttgtaaacacaccaatcagcaccctgtgtctagctcagggtttgtgaatgcaccaatcagcactctgtatctagttaatctggtggagacttggagaacctttatgtctagctaagggattgtaaatataccaatgtgcactctgtatctagctcaaggtttgtaaatacaccaatcagcactctctgtctagctcagggtttgtaaatacaccaatggacactttgtatctagctaatctagtgaggaggtggagaacttttgtgtctagctcagggattgtaaacgcaccaatcagcaccctgtcaaaacggaccaatcagctctctgtaaaaccaatctgctgtctgtaaaatggaccaatcagcaggatgtgggtggggccagataagagaataaaagcaggctgcctgagccagaagtggcaacctgctggggtctgtagaagctttgttcttttgttctttgcaataaattttgctactgctcactttttgggtccgcattgcgtttatgagctgtgacactcactgggaaggtctgcagcttcactcctgaagccagcgagatcacgaacccaccagaagaaagaaactcctaacacatccgaacatcagaaggaacaaactcaggacacgcggcctttaagaactataacactcactgcaagggtccttggcttcattctcgaagtcagtgagaccaagaacccaccaattccggacacaatttgactgcagaaaatggatgtccaaccctgtggtttccctgggccacattggaagaagaaaggagttgtcttgggccacacataaaatacacttactatagcagatgagctaaagaaaagaaaaaagtccatgcgtaatctttgtgatatgtgccaccaccaataagcaaaattgttctcttattcaaaaggttggacacagctgctctagatattttattattaaatatgcaggcaattactgtttaaatgaagatttcctcacagaatgagattaaaagtatatattagtggcttagcattcattttagacaaccattttagagattcaaatcacacacttgcttacagaaattttgttgtcttcaatgtccccattgtggtttctttaccaagcctctactgttcttcacatcaccaagttaaaaaaaaaaaaggggcgggggggcagaatgaaaattgcatggtaggccacaagttcagatcctcatcgacacaagaggtgcctgaagcagtggatgaggcttttctatggatcatgagcagccacataaatgcttaaaagggcctggcagggagcatcagtgggtgatgtggctgggaggctgaatggagagcatttgttcttcagttatctatagaaggcagctgtcactcagcaccagctaagggcttcccatgagggaactggggatcaggtttcccagatctttttatgtaacaggataagacagagatccagctttttttgggtaattatttcctattttaaaatacgggtagttgattaaataaaaacaaacgaatgaacaccatatgggcacaacaaaacacatctgtggcttggattcagcttgtgaatgattactgcagatatttattctagaggacacccctgggtatgtcctaatataaaacctaaatctaaactcaagtcccatgctaccttcagagaataaatgacccagaaaaagaaccacctctcctaaggaagtataaatttgtaaataactgagacccaaacttacaactatacatttttcttattgttgggctgttgctaacctcaattaagaaggcttgatgatatttgtaaagtgtcatcactccaccatggtccagtaacatctgatcactccaccatggtccagtaacatctgaatggtcaagaaatatctaaacgtatgtaccaaaaatttgtgtatactactgtaccaataaaccatttgtttccatttgatctctgagtgtggtaatacatgttatttgccctgctgttgtaaataaacaaaccaaatggaggcttgatgcaagatgcagtgtagcatagtgccaactctggactccgactactcagggtgtaaattctaactctgttctattaacaccatgaaactgagcaagttagttaaaactcgctgggcccattttctcatttatacaatggagattttaatagtacagctacataggccattttgtggtttaaaatacatcatgattatgaaacacttaatgtagggcttgctacataatgagcaaggtttgttgctgttatcattaatatccttaattctcattattataaaacttgagatagtatgaggtgaacaagttcataacagcaatataatgaaaattttaataattccttttatactttaacaaaaatacgagattgggtaatttattatttttacatgagtaataaatattgcattaaaatatatttaaaatttaccacattaatgtctgccagtcatgccaaatgaccaacatgaatgtgaataaaactcagtctgtgcccatttaatcttaaccaaccctttataattgttaatgatttgaacctctgccttgaaagatcacattacttgattgtcttcaacttatctgaatgtggtagtgatttctgtaaatttataggacctttgtctcatgcagctccatggagttgaacttatgcacctttaaaatggtatatacttaattaattaagtgttgatctgcttcacatgtgtataatattattagctcactaaaccaagaaaacagtggtcctttagggaaagaaactaaattacaacagagaatataaataccatataaatatctattatttattgaactgtcacaattattgcaaaaaattaccttttagtggacaaaacaattgatattgcccttttctggaaaagaaataatgtaatatatgatgaatagttttggccagtatcctctagaccttgccagttaactggctctcaaaattttgaataataaaaacttggtgatagtagaaaaatagtaattttttaaaagtatgtgcacaattatacaactaaacaattcattcaccagtgttcacaattctattgccttctttgaatcaaaatttacatagtttttcttttagactaagctcctttatgataccagtgtgcccatttctcattaccattgaaatgtctcatgagcatgtcacattctggtacaactgctaatccaggatgacagtttagttcttttaaatccaattgagagccttctactcatgaccagagaacctaaagaaaggttaagatacatttattccttggtgtaagtgatttgtctatttttagttttcctaagggtcatatttcaatttagatttttttttataggttaggtaaaataggcttcccttttgcaatatgaaatatgtagtcttttaaaaaatttcttcaaagctattaaactgaaaaaaaattaatttggtctattcagtttgttagcacttaccattttggaaagagagtgactctacttttgtatttggtaacattttccctactacagggcagtatcttttgtaagttcttagatattagcaccaaataaataggcaaaaaaaatctattatgttaattcttagaacccctgcttggcagtgcatcattgactagatggagaagaaatgaaaataatacattaggaagcagtttcctggttcttttgaaaacaactagagagtcttgttgttgactggaatatctgaagatcctgtttaatgctttcattctatgattgttaagaatatgtcatagaactgctgtatcctgtttctttatgtcttcccttctgtttgttgattagaaatccctgagtggctttacattattagtacagtagatatgtagtatattcccataataccactgctgctattgactaatagtaataattttagggcagctttatgacagttggtttatgttttagggtgtcatttgacttgtgaagcattgaaatctgggtattaagcacactgttttctatgtggtatggaatgattcttaaagccctgagaaaatggaaaataaaaatatttttcctttttaccataatcacctatgactgtcactctatcataaactgcataaactttataacctcaaaacattttggaaatgaaatgacagaacttgcttactcaattgcttctatatacaccaaatatttttttaaagtattatgttaagtccttgaaaatattttgttctactcaatagaagcagtttaggttggtagttctatgtggaaaccgtgaggaaataattttatattatgatgactagaccagtctttgaacatcactttggttattgttccattagtaaatattataattatttctgagatttactcaccttcaaagaatgttggcaatgccagcattattaacactcctctagttagaacaaagaggaaatgtaataacaaaacataataatagccaaataaagagtgacttagaatgtacacccttatctaggatcctgagtaattcgattattcttaggaaatacacttttgtgctagaacaaagacttttgaaatagctaatttctgggtttcttttcattttgaattaacttgaatttcaaggaaacaagggtagtttttacagatacagtgcatagaagctctgtgtacaatgaagaaaagtaggaaagtgagaaaaatgccattagatttttcatcgttatactatctgatatgtgaatttaactaaaacttatatacctcattatagtacttcctaatgtaatttcttaatttaagtgttccccataaggtttttttttatataaacttaagtactgttaaatatttaaggcaaattcaggtataaaataagacttgttgatatcttattccaagcatatttgtttctctcctatttatttttattctgtgttcatttccaaaattgttttactcacaactgtttgttttttctgtttcattctgtggtaaaggtatcatttggctaattgtataatttcagtgtcatttctaatattccaattgtgatagtatcaacacaagattaaatttctctacatggtttatgagaatggaatgccaaattgaaatagaacagagcacagatgatctaaatataaaaagaactacaaaaatcacagttgtttaaaaaggttttttgtttgtttatatatggtgcagaacatttgttccttagccaaatgtttccaccttgagaaagctatagagattctatgtagtcctagtaccaataatatgttttaacctgaatgtaccttatctttattcataaactgtgactttttacactgctgaaacttttttttttaagacaatctcactctgtcgtccagtctggagtgcagcagtggtgtgatcttggctcactgcaacctctaccttctgtgttcaagcaattctggtgcctcggccacctgagtagttgggatcacaggtgtacaccaccaggcctggctaatagtttttgatatttctagtagagatgagttttgccacattggccaggctggcctgaaactcctggcctcaagtgatctgcctgccttggcctcccaaagtgttggtattacaagtgtgagccactgtgcctggcctgaaactcataattcatttccattaatattaatctcaccttttccaataattaattgatttcacaagtattagtcccctataatcattgaatggctaataaaattatttatagcaaacagattaattatctgccagcagtctgagattagtttctttaaaaaatgtttattatttaaaacattcagctgtgatcttggctttcttgtgaggttcaatagtttctattgagtaaaggagagaaatggcagagaatttacttcagtgaaatttgaattccattaacttaatgtggtctcatcacaaataatagtacttagaacacctagtacagctgctggacccaggaacacaaagcaaaggaagatgaaattgtgtgtaccttgatattggtacacacatcaaatggtgtgatgtgaatttagatgtgggcatgggaggaataggtgaagatgttagaaaaaaaatcaactgtgtcttgttccattccaggtggctgcttctttggttgtgctgtggctccttggaaagtgagtattccatgtcctattgtgtagattgtgttttatttctgttgattaaatattgtaatccactatgtttgtatgtattgtaatccactttgtttcatttctcccaagcattatggtagtggaaagataaggttttttgtttaaatgatgaccattagttgggtgaggtgacacattcctgtagtcctagctcctccacaggctgacgcaggaggatcacttgagcccaggagttcagggctgtagtgttgtatcattgtgagtagccaccgcactccagcctggacaatatagtgagatcctatatctaaaataaaataaaataaaatgaataaattgtgagcatgtgcagctcctgcagtttctaaagaatatagttctgttcagtttctgtgaaacacaataaaaatatttgaaataacattacatatttagggttttcttcaaattttttaatttaataaagaacaactcaatctctatcaatagtgagaaaacatatctattttcttgcaataatagtatgattttgaggttaagggtgcatgctcttctaatgcaaaatattgtatttatttagactcaagtttagttccatttacatgtattggaaattcagtaagtaactttggctgccaaataacgatttcctatttgctttacagcactcctcttcaagacaaagggaatagtactcatagtagaaataacagctatgcagtgattatcaccagcaccagttcgtattatgtgttttacatttacgtgggagtagccgacactttgcttgctatgggattcttcagaggtctaccactggtgcatactctaatcacagtgtcgaaaattttacaccacaaaatgttacattctgttcttcaagcacctatgtcaaccctcaacacgttgaaagcaggtactttactaggtctaagaaatgaaactgctgatccaccatcaatagggcctgtggttttgttggttttctaatggcagtgctggcttttgcacagaggcatgtgccctttgttgaacctccatttgactggcatgcacatgtctcagatattataggttatcatatattgttgctcctaatatttctgtgttagataattagagtagcttggtttgtaagaatgtgatgttggtgggactgtagcagaacaagaaggcccttatgggtcagtcatacctctcttttcaaatatttggtctagctctcttctgggcatcttgttgccaatatatagtattgctcaaaagggcaggagatttgaagtgatcaaggaaaatatattttttctattgattaagtcttttgatggggtagaataatctaatttcatgtaactgctcaaagttatatggtagggggatcccaaatgtattttaaaactatttttatatcatcatatttgaagtaatagaaagtcagagtagcagaataaaggtactaaaaattttaaaaactaataaggtactttgaaagaaatcaattatgttgattcctcattaaacaaatttgcacttaaagactgaggttaataaggatttccccaagttttttcatagcaacctgtgagcactttctctgttgaggcatttatggtatgaaaagatgagtaaggcacagttcttgccctggagaaggtcacaggtgagaggaggagttgacacagaaacatttgatataaagcaaggaataaattccaagactaaaattttcagaaatctaaaaaactcaagataagaaaaacccattatattttctgggtaacaaaatttcagtgttattaacatgtaggaagatcttgatatttattctgaagcccatgtgtgttgctgaaatattgccgcatttgcatatactcatcaccatcctctgttttggagctaagaattttagactcaagatgtctaattaagttgatccattgattttattttttatggaaatctgagacccacagaaggcaggggatttgcccacatttctagaagagtcagacatgagcgatgaggcacagtggaaagaacatgagcattgcctgagctctgagttggcgctataagagcagtgatcatgggcaagtgactcttctgagccttggcctcctcacctgttaagtgaagaaaagaatatttcagaagatctttgtgagaatgaaacaaggcaatttacttgcctgctacatagccaatgggaaatcaatataagttccccgtggttcccttctgtggggttttgttcccacagagggtgcactggccattccacttcttcttttccaagctcctcattccctttaacgctgttcatagttggttccaaaccatttgaaatataataagcaccaggatggttttttctttccaccaaagcaaatttcattttctaaacactgtttataaatatcaatggctattttttcaatttttgattatcatgaaaatatacaaatatgtttaattaaatatgctaaagaatgtattaataaatatgtattaaataattcctacatataaggcctttttgcttggggtatgggtgatacaaaataaatgtggcatgaacccactgacctctagcaatttataacctagaaaaagagttatgatatgtttataagttcctgtgatataagacatgcatatagtcattataacagaggtgcaaacaagatgtatcaagtatgtccagaggaggaagagattaatcccagctggaggaaacactgatgctttcttgcagcaggggcatttgagttgagaaagggaggaaacatagattttgacaatgagagctgaggggaaaggggtttcaggtggagggaaccgcatgtggaaagcagggaggtaggaaagtgtagagtgtgtttaaagaatagaccagtttggctgaaacaggatatttgagcagaggaagcttgtactaggtaggtgggttgaggccaaattatgcaaggcattaaatattaaactaggaattttggactttatcctgcagtttatggggggtaaatgataagattcaatatcactttatttgtacagtattatgttacattttatctaattgtttgtttaattcctgtctagacaatgaattcctcaagggcaaggagcatggcttattcacctcagtaatttcagtgcctagcattgtgcctggtacaaagtggacacttgtatataaccttttttaattgaagcaacaagttgtcaaccttacaaatgtgaatccgtgattcagatgacaggttgaaatgtagattgtctgcgaagagggcagaaagagagtatgacaaaggaggacaagacagtggggcaggcagggagagagagcagccagggtttcggtagaggtatgtcaaaaaggtatggaagtcagaggagaaggagacccctatgttatagaatacaaatggaagggaaatgatgacaacagtaagttgtcattaaatgcaaggttgcaaaagtaagattgtaaagcaggatgagtacccacctattcctgacataatttatagtaaaagctatttcagagaaattggtcgttacttgaatcttacaagaatctgaaacttttaaaaaggtttaaaagtaaaagacaataacttgaacacataattatttagaatgtttggaaagaaacaaaaatttctaagtctatctgattctatttgctaattcttatttgggttctgaatgcgtctactgtgatccaaacttagtattgaatatattgatatatctttaaaaaattagtgttttttgaggaatttgtcatcttgtatattataggtgggattcttaatagattctccaaagatatagcaattttggatgaccttctgcctcttaccatatttgacttcatccaggtatgtaaaaataagtaccgttaagtatgtctgtattattaaaaaaacaataacaaaagcaaatgtgattttgttttcattttttatttgattgagggttgaagtcctgtctattgcattaattttgtaattatccaaagccttcaaaatagacataagtttagtaaattcaataataagtcagaactgcttacctggcccaaacctgaggcaatcccacatttagatgtaatagctgtctacttgggagtgatttgagaggcacaaaggaccatctttcccaaaatcactggccacaaagtgtgacattttggcattggcatcactatttgatggaagccaacctccccccaaaaggcctgtattagaatgaagatggattccctgggtgggttacacttgaaactagcctcacccatgaacactttggcacagattagctagcccattcccccacagtaaggaccataaggaagggacagaagcaaagataagttttagaacaaaagagaggggaaagaaaaaatctagggttttatgagggctgtccctgagtgatagatgtgaataggcctccagggcaggctggctcagaggctgactctttgggttggggtgactgattggtggtgaggatggagaagaaaaggggagtggaggaggtgaaagtgaccttgggacattaggtctccataagtgacaggatttaaggagtgttgtaagctgtggttgttggaccaggtttaagcacagcttcctgagcttcctgactggtttaggtcaagctccagagagcaaatgccacagtctcagtgatctccttggagaaacagttggaataggatgttgcccatgttgggatgagtcattgtccgctcttgctctttccctacccctgcaaaataataatactgtatttgattgaacatataaaacaaaagaaggattatcacataagtatgtatatataaccaacattggcaggtgcagaaaaaccagactgtcagtttgcctcatctgaaatgattgacacaaacaaatatatttactgtcccaagtgaactttggcattttggatatccttcagttgttctgtttaaagatataacttagaagcagctgatggaatatttaaatccatgcgttgaattcatgcattcaaagaaacatgtcctgagtcactaaatgctgacatttgtttttcatgttaagagtgtaaataactggtcccaaatataatattattacatcagataaaaactggaatgtgaacctcttaacttgattgtgaaagtatttgccaatggtgcctcttgataattatttgaggctcacttcagaactcctctggaagggttaatttttaaatagtcattttataaattaacatttttgacatatgtgatggctctcaaattttttcttttatgccagtttgaatcatttctgctcaatttttttttttaattgggatggagtctcactctgttgcccaggctggagtgcagtgatgcaatcttggctgactgcaacctccacctcctcggttcaagcgattctctcgcatcagcctccagagtagctgggattacaggcgcgcaccaccatgcctggataatttttgtattattactagagatggggtttcaccacgttggccaggctggtcttgaactcctgaactcctgacctcaagtgatccacctgcctcagcctcttaaagagctggaattataggtgtgagccactgcaccaggccctgttcaacttttaatgctaagattcatttgttgttgtttcacaagtgattaggcagaggtcttttatattaatttacccattttatttgtaagagagtctcatattaaggaagcataatatatgacaatccaaatacagtacaaatttggttaattttgattttgttaaataattaatcacaggggtccttcaaattgtgagctcctctggttatacttatgttttacctctggttatacttaatttcaaacaaatgaaatttcattctattcatgatatttcagaagcagatctgttgcacaaaataaagcatacctataaattttctttttttaaaaaaaagtctctgttcactctattttctattatttttctctttttaaaatttgaattttattgtggcaagtccacttaacatgagatttaccctcttaacagatttttatgtgtaaaatacaatattgttcaccatgggtaaatgttgcacagcagatctctggaacttattcattttgcactactgaaattttatacctgttgattagtatctccccatttccctctctcccctgtcctgttacccatggttctgttctttgcttctttgagtttgagtattttgatacctcatgtaatcttcattctattttctaactttgacaatgttctgacaaatttgctttccggattggagcactgtatagtgaaaattgaaaatcttggttattttctacagattcccactattttaccttgagcagacacttatcttgaagggtctcagatttgtcacttgtagaatggggaatataaacctgataatggtccctttcagttctaaagttatatcagttgaaaatacatgtgtcacttatggtaacgggtagagaactggctcactgaacagcatatggatattataaagtggttttttttaatcctttctgcagacagttactttatactttattcaaatggattattgtgaagtacatgttagcggactttgtaccttttaaaaatgtatgtatttggtgtaatgtagaaatatagaaatttattaagtatgatttatttcaatgttaagcatgagaaaatatgctccgaaaggttagatagcttgcctaaatgacaagcttgtatttcaagcagaactttctgaatcaaaagactccaagacgaatgcccagctttcaaaaactgtctaaccaaaataaatcctaagattcaccttcatactaaaattatttaaaaatagtttattttaaattaatattcacttaaaatgtatttatcatgcaatactttaaagtgtctgggaaatgaaaatatccaaagatcaaagaacaccatgttttcaaacttcaaaaatgttatcagtgacctaaacaatttttaaaattttcatagagcctatgaaaaatgtacttgcaaatggctactttctgactaggaatagaatggggagagtatttagtccaacaatgatagactggattaagaaaatgtggcacatatacaccatggaacactatgcagccataaaaaatgatgagttcatgtcctttgtagggacatggatgaaattggaaaacatcattctcagtaaactatcgcaagaacaaaaaaccaaacaccgcatattctcactcataggtgggaattgaacaatgagatcacatggacacaggaaggggaatatcacactctggggactgttgtggggtggggggaggggggagggatagcactgggagatatacctaatgctagatgacgagttagtgggtgcagtgcaccagcatggcacatgtatacatatgtaactaacctgcacaatgtgcacatgtaccctaaaacttaaagtataataaaaaaaataaaaaaaagtttgaggtgtttaaagtatgcaaaaaaaaaaaaagaaataaatcactgacacactttgtccactttgcaatgtgaaaatgtttactcaccaacatgttttctttgatcttacagttgttattaattgtgattggagctatagcagttgtcgcagttttacaaccctacatctttgttgcaacagtgccagtgatagtggcttttattatgttgagagcatatttcctccaaacctcacagcaactcaaacaactggaatctgaaggtatgacagtgaatgtgcgatactcatcttgtaaaaaagctataagagctatttgagattctttattgttaatctacttaaaaaaaattctgcttttaaacttttacatcatataacaataatttttttctacatgcatgtgtatataaaaggaaactatattacaaagtacacatggattttttttcttaattaatgaccatgtgacttcattttggttttaaaataggtatatagaatcttaccacagttggtgtacaggacattcatttataataaacttatatcagtcaaattaaacaaggatagtgctgctattactaaaggtttctctgggttcccaaatgatacttgaccaaatttgtccctttggcttgttgtcttcagacaccctttcttcatgtgttggagctgccatttcgtgtgcccccaaactctacttgagctgttagggaatcacattttgcagtgacagccttagtgtgggtgcattttcaggcaatactttttcagtatatttctgctttgtagattattagctaaatcaagtcacataaacttccttaatttagatacttgaaaaaattgtcttaaaagaaaatttttttagtaagaattaatttagaattagccagaaaactcccagtggtagccaagaaagaggaataaatattggtggtaattttttaagttcccatctctggtagccaagtaaaaaaagagggtaactcattaataaaataacaaatcatatctattcaaagaatggcaccagtgtgaaaaaaagctttttaaccaatgacatttgtgatatgattattctaatttagtctttttcaggtacaagatattatgaaattacattttgtgtttatgttatttgcaatgttttctatggaaatatttcacaggcaggagtccaattttcactcatcttgttacaagcttaaaaggactatggacacttcgtgccttcggacggcagccttactttgaaactctgttccacaaagctctgaatttacatactgccaactggttcttgtacctgtcaacactgcgctggttccaaatgagaatagaaatgatttttgtcatcttcttcattgctgttaccttcatttccattttaacaacaggtactatgaactcattaactttagctaagcatttaagtaaaaaattttcaatgaataaaatgctgcattctataggttatcaatttttgatatctttagagtttagtaattaacaaatttgttggtttattattgaacaagtgatttctttgaatttccattgttttattgttaaacaaataatttccttgaaatcggatatatatatatatatgtatatatatatatatatatatatatatatacatatatatatatagtattatccctgttttcacagttttaaaaaccgatgcacacagattgtcagatagcaattctgtgattgaaggggaaatatgtcacctcttcatactcatattggtgaagggtcctagcttcaaaattaatagattcctaaagaggggaaatgaaacatccgcatttacacacacacacacacacacacacacagagttcctcttgtcggtaagttttgttttttttaaatctctactagataaaatttgttatctaattgtgagttttacacaaagaaaaactgtcacagaaaagaaagacagtgtcacatttttcaaaagaaaaagaagaaaagaaagtgccatgtttttcaaatacaaatgttctggattgattttaggatctttagtgaaaaacaaagtatttcataataagtaaaataaaaatctatgtaggtaaatttgtttctctaatttaagaatttgaatttctgagtatttatgataagtgttgaaataacttcttatatgtgacagtgaatactggcagagcaaatgccaaatcaatgccaaatctgtaggatcatttgattgtaggaacagaattctactcaaaccgaaagcaggcatttgctggagttacagaaaggcctcatggaacaccgagaaggtggtgccattcgactcttaaagaagctgcaacaggcacaagagagtcagctgcagctcttcttcttgagtctatatctgtcctgggtccattcctttttgtggttgcttcattcctttctctctctgaagactggtttttctggtctaccagggctatgccacattgactttatgtagtgtctccattctggcctcctgaatttacaggagagttcctctgtacaaactcaaagtcctggagagaacagaaaacagcttccttttggctcaggggtccaactgcagtctactctgctgctatgaggatagtgggttcaccacctttgttgttctctcagctagggcagtgggaaatgactctatgaaaggaatatacatgggcaggcaaatgtactaatcctcatcagtactgtaattttaagcaactttaaaaaattcttttaagttatttgaaaataagatcaaagaaggctgaattacataaatgaagatttgttaacaattaattcaaaccaatataacacatgctataacatggttgagtgtgattgagtcttgatttattaggggcaataatcaaaacatttaacaatcattatagtacagaacttaccaatcaaatcagatgctcagccggagtggatgttggccacccagctattattatccctggctcaattggtcttcagctgtgttaacttgcaaacattaattaactatctaagcccctcattttcctcaagtgtaaatagacacaataatattacctattccataggtgtggggtgaatagtaaatgtaataatttgtccaaaacacttagtatagtgcctggtccatggtaaatactaaataaatgttatctgacttattattaaaattttatcttctcagcttaaccttcagaacagtaatatattggggtctagataaatcttgcctatatgaaaataatttaatactacatgcagatatatgctgtgtatattatgccttctgttagaggaattgcagaaacaaaaatttcaattaataataagatgaattatttctcccaattgtagaatcttttgacaattttatcatgcattacagatgtaagaactcttgattgggacttgatagtctaactttataataatttaagaacattcctcttagagaatttctatggccataatactgaacacatgaattttaattagctgtcctctttagccctaaaaaaaaaattactgtaatttaacacttaagtgttgttcttcccaggtacagtaatctttttttttttttttttttttttttgcatagagggtaatcttttctctttccaaatggcagaactgttagttttctgactgtccggtgaaattctaagtccacttacttcccaatagcatgcaattagcaaaggtcctccttgcaaaggcacagaacacacctaaacatcttgcagatgctgtttggacactcttcccctgcttttggtctctttgtaaagcagctcatctggatacaggatctcttttccccattgcccattctaatatatgttaccgttattacttatagaataatagtagaagagacaaatatggtacctacccattaccaacaacacctccaataccagtaacattttttaaaaagggcaacactttcctaatattcaatcgctctttgatttaaaatcctggttgaatacttactatatgcagagcattattctattagtagatgctgtgatgaactgagatttaaaaattgttaaaattagcataaaattgaaatgtaaatttaatgtgatatgtgccctaggagaagtgtgaataaagtcgttcacagaagagagaaataacatgaggttcatttacgtcttttgtgcatctataggagaaggagaaggaagagttggtattatcctgactttagccatgaatatcatgagtacattgcagtgggctgtaaactccagcatagatgtggatagcttggtaagtcttatcatctttttaacttttatgaaaaaaattcagacaagtaacaaagtatgagtaatagcatgaggaagaactatataccgtatattgagcttaagaaataaaacattacagataaattgagggtcactgtgtatctgtcattaaatccttatctcttctttccttctcatagatagccactatgaagatctaatactgcagtgagcattctttcacctgtttccttattcaggattttctaggagaaatacctaggggttgtattgctgggtcataggattcacccatgcttaactgagtggtgccaaattgtcctcaagtctgttgtactgatatatatccccatcaagagagtacaagaattctcatagctatgtatcttcaacaacacttggtgtctggtagatgtgaagtgattactaaaaatatagggaagctgcatacataattattggcttttgctgttctcttacattaatttcttattcatgttgattactcatttgtcacctagttttttcttccttaattaaattgtaggaatttatgaattatggattgatcatcagctctatacatttcaaacataatccctcagtcagtggcttggcttatagagtcttttgatgaaaagaagcttttaagtttaataaagttcaatttattgtcttttcctttatgttttgtgcttttggtatcttgattaagaactccttccttatattgggttctcaaatttagcagcataacattttcatactattatttaaatttttttcacattatttagtgatagcacctttcttattcctaaagtgtttatcattgccttctgtctttctgcttgataaatattgccacacatttgtatactttattagtgtgtacaaagaccacattttagttgtgttatttctcttgttttggttttctagaatgcagagccattaatattatagtaatgcttatgtgctaataccatatcaggggcacaaatcccattgcagcgggactgagaaattaaaggaaatgatgcacatttactcatttttgtttaaaaaatcaaatgcatatttttcaatcagactatatggttggtctggatagcttcatcattgaatttttaaagtatttttgtactactgtatttaaaattattcattcaccactgcttttgtagatggtttagaaacccaagttaggaatgactgtgcaacactattattatactctttttaaaattatactttttgcttaagtttctttccttgttctctgagacagtgttcatgttcccaaaccacacacatttattcagctataaaatttgtatgatcaactcctgtcagaacaaacatcattataaaaaatatctccaggaaaaagaaaacccttttaatgctctcttctggttcatgtgtcttcttattttctttaagcattttcataacccattgagctgtaatttaattggaacatgatttatactaaagttggtttctttacctttaacttttttttttagtttgatcagctctctttagcttctgtagttcggtctttaattccattccagtatgcttttggagttgggtctcataaatgtatagaaatgtttctgttgggaaacagcaggagaatattaaataaatattgtgcttacatctatttaattctttgcccaactttctacaactttgactttacatttaagctcctcatgcacttacatgtttctttacctaaaaatatcttttcaccatgggtgtgtacaattcctttgtccttgctgtattaattttcttggtttacatagtagcctctacacattgatgtcaaaacctctgtttggtgcatttctactctgcgtgttcaatctccatgaaagtttctgtaaggtattttcattcctctagtttttcacatgtgcatcctggctttgtgacctgtgctttgatatcgtgcctttcatcttgtggcattgaaggatctttgcaaggacctattgtgttataatacagtctatgaaaaatatcaatatttgcatttgatcacatttaaaaaaatcacattcttttgtttgaatatcaaagctaatatgtgagtgatttccctgccaaatagcacaagtagcctttcctgggtgtttatgggcatttatctggttaatgattcccatcatagtgctgtcacccatgccattgctaaacttatacagtaacttttttgttttcacctcagcatatgttgagagtaggaaatagataggactatgccctcaaattttacgtttatatgatgttaatcctaaaggtccttgtgacttctgaagtaaaaactcagtgttgtcattttacttactgaattgttagctgagtttagagttgagtttacaatggagtaaacaaggtgtttagtttgatgtatgcttttagtctttcagaaaaaaatgtttatacttggaaagaatagtttatttacccatctggcctagtttagacaaaaacacagagtcaaatgtcaacagaattctgaagttataaaaatgacagtgtggctttttttttttttaaccttccacctggtgcttatgcccaagtgcctagctttctttagctctcaactaataaaggtaatgtttagataacatttaacgttaagttgcattgtgtttatgatcacatatctcaaatattggtacacgaaactgtacaacaaccttttttattagattttcctacgaaattccttattatattccctaagatagctttttcccaccttcttcttccttctcccttctcaggtgctccaataattccaacccctgcagccagtgactttattatatctttttttaaaaatctaaaaaaaaaaattgatgcaaccaggaagaattttctcatttctctccaccagttgtaccagcctactgcacctctcctcatgcaccaccttctgcctgtgttcttgctcctatattcaggagcaagtaatatgcaatacctccctctttgtgggatctttctcattagcataaaaatactttcccttgatctccagctactaccccatttctttgacctacatatagcaaaatatttgagaaaggaccactttccatcttttcctcaatctacttccatttttttctcaatccactttcatttcattgttctcctcaacccattctttccacaacctacttcattttatttccatcagccccataactcaggatcaacatcttgccagagccaatttccttgtctcccttaacagctccagcagtatttatgccatggacaaattattcttcttgtgatactttctctcttgcttccatgacactactcccacttcattttctttctacctctctggctcttccttggtcccttttcctggccccttctctctttcagatctctaaacatcagctatatctcagccctgttctactgacactctctagctgttattttctaaacccatgtttcagaaaccatatcttgatgaatcttggaaggccgaggcaggcgaattacttgaggtcgggagtttgagaccagcctggccaacgtggtgaaaccccatctctcctaaaaatacaaaaattacctggccgtggtggcatgcacccagctacttgagaggctgaggcacaagaatcgcttgaacctgggaggtggaggtttcagtgagccgagatcctgccactgcactccagcctgagcaatagaggagactccgtctcacacacacacacacacacacacacacaaagaaaataaaccatctcttgatgaatcataaatttgtgtctctagtttagacctctatcctgctctctaaatgatgtatccaactatcatcttgacaccatcatatgttcataaaacataattatagaatatctttcagtaggcttgacattttaaggcatgagtttccgttcagtatctccttaaaatatacccagggtctcaggagactattcaaacaggacaaagcttctattctacttactaatgtgtctggccctatttggcaggttggataaaaagtcatctgaacattgtcactttatgaataatatagtttaatagtttgtgaatcacccctgcaatttaaaaaatagtaaaattatcagaatctaatttaataattcctattggaacaccccatgttaggggatttccagttatttcaattgatatctcaatgttttaaagattgtttatttctattactaattcactctttattttaacataaattgtggctatctatctctattcatttcaattatatttctcataccattctatagatggggtgaaaagaaaagtgttaattttttaaaactccatacctcaaatactatatgaatttatagttgttattgctaaagcaattatcttacatcttttcctccaaaacaaagttatgtgctggtttattttctttgtactcataagatgccttccatttttagtaacataagtcttgtctttctcctattcttagctacttaagcattatgtagcttaaataagcactaaagattcctatctgtatgaaaaaataaagattaaataaataagatctagaaagggtgacaaggtgatgcttcaaaatgaaccataccaagccatctagcgattgataaattactcacactcataatcacattgttggaaagaagccattgacaattcagtttgtttcacaactgtctatcacatagtgagcacaactaaaagactactttttgtcttttactgcttgttttgttgatcaagtgactgattgtacaatgaccaacaagaagtctgatgtgtagagaaaaggggaacctggcttttctgccttactcctgatgcctaattctgagcatgtgaatattattctgtttctttaattctccaagtgaagcagcagataaaccatccttgtttccattagctgtctaccctgttcaactgtgtgtttctaataacataagaataagaaagccaccagggtgagcagggaaggcaatgagtctgcaaggcttgtggatagatttctgttagtgaggctctagaaagttcttccaagattgatgcaatctgagaagagttttctgtcaatacaaactccctgggtttctcctttgtccttttactgcctgtgtttgttttgggttccagtaaagatcaagtgactgattgtaccatgaccaacaagaagcctgatgtgtggagaaaaggggaacctggcttttctgcattactcctaatgcctaattttcttgtactgaaagtagtttttgctgtaagaatctgaggggaggagtcatttcttcaatttttttttttggtctccttttaatggtttcttgatcatgtctatccttatttttctgttttcacaaatttttgtggtatattttcctctcatgacctctgtctcaagacttctttccatccatctcttctcatttcatcctgtagagtgtctgtggtaagagccctgcattctactctggccttgccatgtgtggccttgggcaagtcctagcctccttgagggtcttatttttctcatttgtaaaatgaaacagtttgatgagaagttttctaaggttccttcaagctttgacaatctctctcttctggatctttttcccatgaaaaatttcaactcttgattagcatgtaggcagggattattccacatccttataggaatcacatttctgctactgtccctgaatgctagagtccattgattaagttattcactgctgcaattgtcagagctgatcaaagaactctgaaccagtgtgttactagaactaacaaagaaaatgccattatgatgttctagagtcttgaattagtagaagaggtttaataagaaccctaagggattgctagaatgttaaaaacaaacaaacaaaaaaaaaggttgaaaagtttagaaaattcactggtctttgtgcccatcattttacttccagggtttagataatctcatttttgcaatgaaggaatggattagatcacaagttctcatcctagtagcacatgcagaatctttataaaaacacagagtagccaggtgcggtggctcatgcctgtaatcccagcactttgagagcctggggcaggtggatcacttgagaataggagttgaagaccaagctggtcaacatggcaaaaccctgtatctactaaaaattcaaaaattagccaggcatgatggcacatgcctcccagctactggggaggctgaggcaggagaatcgattgaacccgggagatggaggttgcagggagctgagatagctccactgcactccagcctggtgacagggtgagactccatcacaaacaaaacaaaacaaaagaaagcaaaaacacagattactcagggtccactaagaccagtgaagtcagttctcttggtagggggcagggtgactgagcatgatgtttgtaattttaaaagtgctccaggtgattctagcgtgtatcaagcaagacttgtgaaccactgaactacatgctaagactcattttagctctgattttctgtgagtcatagcagagggctcagcaaactttttctataaatgctaagatagtaaatattttcagctttgtgggctgtatcgtctttatgacaactcaactcagtctttgtagagaaaagcagctgtacataatatgtaaactaatgggagtagctagatgtgtcctgtgggccatagttttgctgactcctggtctatgtcatagaatttccttttgaattgatggaccaccagcaaatgatttttgtcctgtatcaatcaatgatacatacataaatctctacaagacatgtaaaggatgaggcttaatgacagagtactttggggaagacataatattgcaaaattaagatgcttagagaaaaatcatattaaaatagtgaaaactgtgagaaggtattttgatttgttgttttggattcctctttttgcaaattcttttgaaatattttcagtggaagctacatagatccaattgtattcaccaagctagattgtaattaagctccagagtaagtaatagatttgatgagtgatgtccaaccttttacatggaagagtaagtttgagtcttcctttgcccattgacacacttagtaccatgtttaccaaagttcttagttattgaaatgggcaccagcatattttgaaacgttggtgttaacttgggatatgccttttgtcatgttgcaaatagattttgtttctgttttgtgaagatcaccatctctgtcacttctgatagaaaaagtgacactgacttctcaagtgatttgacacaggttaaaatatgtaaaccatttctgtagagagcaagctgtaataatatactaaagggctaggtttatagtataatataaataactcatttatgctgttaataatttatagcaacatggcatttgactgactttttatgtgctctagtcatgtaagtaatagatgtggaaacatagaccagagtttcaagaacatgttttgggcagagtctgttttcttgctattatctcttaagtttatgttcatggcctaaagattatgctaatggatctgccttggtcttgggtgtcaggtctgtgttagcgagtattgaaaagcatagtttttgcctactgggaaggatttatgatttaaaagccctaaatctccccttttatgtacttcatacttagaaaatttttcctgtaaactgtgtgacttttttacattgtgccagttttctagatgactctcgtcatatttatttcttgcaatccttctataactatcagttatgaagtctctttatagtgttgccagccaggtctcaggtgtgtgaaatgtattttctattatggattttggggtatgatggcacatagtttgggtgttaatgcctaatcttgatgtactggcttctgaacaaccaaaaggatgaaaggaaatagaacaaatatttttgtgagggagaggagtctggcttcttgacttactctagaaaaagcctgtaagcctcctcttccctccttgtcacacaaagtgacaaagaaaatcaagaattgttttcttcttggcttaaatgcatcccttataaagtaaggctgagatcaggctgtgaagctatctttttgtcaagactgtcataattccaaaacactttgttcttctaatgcttaggttagtaactttaaacatttttataaagatagtgaggtccagttttaaggattgaccccttctcaaggggctcagaagaggttttggagaataataaaattaaataatgaaaccaataatttaaaccagatcatgatccttaagaaaaaatcccatcaaatttgggctaaactctaatatacagaggtctgcacaacttatgtcaagtattcttccccacaaatgaagaatggggttcattgtgtcattggttgggtctcattttggcttcatcttctatttctcaaagtctaagaaaagtgctcctacggaagtgggtgttggctatcatgagactttgctgctggcaggccagcttgctgctctagacagagatatccctcgatcctccttggacaactgttttctgtgcacaggaagcagcaggctggggttaaggagtttgccaatccagtcattctgataattgctgaatatgaatttctatccagcacaatctaggtagctacaatggcacagtagtttttatgtatcaggtgaaaatgtttaataggcactctaaatgagagaaaaggttaagtgaggttaaaagctcaatgaaaacaaatagatgagactaaaaatagttcaataggttgtaacttccatctcatccaaacagcaatgaatattttgaggctgaggcgctgaggggtaaaattgcagcctggactacttgctaatgtagacctacagcactgtcattcttactgcacagacactgctttctgcataggaggtagaataatgaattcatttattattaacaaagatttattaagtgactgcatggtgctaaccactagatggggagggatgttttgaactgtccattgtttgactataacaaggaacgctttgaacgaggttactatcataggcagaatttgtttaacatgaagcctatgagacataagccacaggtcctctcacgtgcaggaactcctttgaaggccctatacttaattttatatgcatagtttggatttggattcttttttttttaagagttccccaaattacttaagcttcaggctccacaaaacctggatctacccctggtagcagctatgaatctttgactatgaaattaagtgtacaagaaatatgactttactttttctgtgattgagtttattttctatttgagcacgcattccactgagtgaaagaaataatatcattgaattcagagattttgctgggttctaagtggagtttacagaatgccatgatattaggaattaaggagtgtgttgccctacatcatcttttgtccgtgctcactgtctctgaggcactgatgttcctatgtgacctagaggggcatggtccaggtagatggagtctgtccttgttctcactgtgagctctcgcttgctgacccttcttcagtttcttccatgcccctgaggggtaaaaagattcaaatctgaagctatatcaagccatctgtgcatagacattccaagcaaccatgttcactctactgctcccatgtcatgcaaggcacaggaagcttcactatggcatgagtatttcctgggctttgccttggaattgaggcacgggcctcctttgttctaaaattccccaaatctacttgaggatagaaccaggatttggttgcaaggcagaacttttcttagaggacctggtatctaaaccctcttgttacccccatttatggaccccatttatggggtgaggagagtgactgcttctaatccatcataatttttgtctatggctactgtttttgcatagacactatgttttgagtccttaggctttggcttttggcgcttaatggccaatattcacatggctcaaaattttcaaatgatccatatctgacttgagtttcaaaagtcagtttttgaaacttaaatgatcagaattgatttgttctgctctggttctgatgtggcctctccttccagaggtactggaggtagaatatccaaggtggaaagcccacgactacaaggaattggttagtaattcataatgttagctgtccacatctattcagtaatggcatttcagtggctgcacaactgaccatggtgaaagtgtctgcacaagccactttttcttcctgtcagaaaatgttctcacccactgaattgaatgactgtctgctcatatgctgtgaatgagtgcccagtcttaagattaaatcacacgttcttggctatgcatatttgggcatgctgtggggagttataataggctgtcttagagtcacattaagcagctagacagacaatgagttggaaagttacattttctaaatttgattggtacattccatttgtcacatttgacattagaagttctggattcaccctctatggtgagcttcactaatggagaatgtaatttgcaatgctcaaacacaagtcctaaacagaaaacattgtatgttacattccagtgctaccaaaatagtggttttgaaagtccttattttctaatactactatgtgtaattttgagtcatttagatagcaacagttaaatgttttatagattgtttggaagtattaaaatgtgaaggatttttgttatatagtgtctttcctatcttgcttaataaaatataagtttagaattgtgtatagaattaacatgcaaaaatatcaagtctcaactttatacagttaatctacatttgtgtatacccttcaattatttcaagagagggatactattcttatgcaggataaatacaataagatattttaaatgaattttaactacatctctggcagtttcatctcaatagtagttgtaattttatctcccagaccttattatagactagcagctctctatgaaaattagtgacagtgtgagtgtattttaattcaaagttaatcaagaatgactgagtcaagagttagctacccctgaaagtaactcataattcagaatttaaaatattacatgtggaacaatcatgactatatgccttttactttctctatcattatttaggttgtgggctttgggtccttttcacatccgttaacagtgggcttgacttcaaaggattattttcttgaatcttgaataattgctgaagacaatttgaagatattttcaagatgaaggaaactgaagcacagaatcactagagtgaaaaaagaacttcacaaacagtgcaggcttgatcaatggcatgggaaaacaggcaatacagttagaattgctaagatggaattttaacgttcaattaaggatctatctctaaactcctctgctttatccaccaatcattccatattaaagatgaagaattgttcccatttcaccttttgataaggaaaaatagaaataacagaagcaaatacacttttgcccacatttttttccaaaaagaataatttttgaagtctaaacgtttggtgtaaataagatgatgtgttaatattgtaaaggaaagctagttaagtttttgactgaataaagccagcatcaataattactagtaagactaaaaataagagcagtaaaattgtgtctaatcagctactaatatctgggaaggattgagccacaggatcaaagatggtatcttttaaaaatagaagttgagtgaattcggtcttcaaattctttctttttattcatttatatttatttactcattagtatattcattcctttattcatgtattgttcaaatatatattgggtacttattatatgccaagttgtttttaaaatcacattccaaattcccgtaagtcataattattcagagatgtatgttttttttaaaaaaaattgaacacctttaaaaattatcaagtccttttatttctgtatgcattaaagataaactttactaaatgttacatgaatagatttataaagcagataaatatttaatttcaaatataacccttatatgcaattatattttccttagcactaaaaatgaatatttaagtaatttatattaaaagtgtaattatttaactgcagatgtatgccaatgacttaaattgtttaaagattatagcaaagttgtttaaaattgtctaatcatgaagagttcacttaaccacctggttgacacataaaattatagttagttactaaggtagttcgagagaaagagaagaatcttcagtagtggttttgaggtgtggtacattttattataatataccggttatacagcattgtgcagtgctgctcatagtagaaataaattttctctttgatgtcatctattcccttgtgtggcttacataactgagaattaggtgatcacaaaaataaacaggcctatacagagcccatttatataagtcctggttatttctcttcagttaaacttttaattatatccaattatttcctgttagttcattgaaaagcccgacaaataaccaagtgacaaatagcaagtgttgcattttacaagttattttttaggaagcatcaaactaattgtgaaattgtctgccattcttaaaaacaaaaatgttgttatttttatttcagatgcgatctgtgagccgagtctttaagttcattgacatgccaacagaaggtaaacctaccaagtcaaccaaaccatacaagaatggccaactctcgaaagttatgattattgagaattcacacgtgaagaaagatgacatctggccctcagggggccaaatgactgtcaaagatctcacagcaaaatacacagaaggtggaaatgccatattagagaacatttccttctcaataagtcctggccagagggtgagatttgaacactgcttgctttgttagactgtgttcagtaagtgaatcccagtagcctgaagcaatgtgttagcagaatctatttgtaacattattattgtacagtagaatcaatattaaacacacatgttttattatatggagtcattatttttaatatgaaatttaatttgcagagtcctgaacctatataatgggtttattttaaatgtgattgtacttgcagaatatctaattaattgctaggttaataactaaagaagccattaaataaatcaaaattgtaacatgttttagatttcccatcttgaaaatgtcttccaaaaatatcttattgctgactccatctattgtcttaaattttatctaagttccattctgccaaacaagtgatactttttttctagcttttttcagtttgtttgttttgtttttctttgaagttttaattcagacatagattattttttcccagttatttactatatttattaagcatgagtaattgacattattttgaaatccttcttatggatcccagcactgggctgaacacatagaaggaacttaatatatactgatttctggaattgattcttggagacagggatggtcattatccatatacttcaggctccataaacatatttcttaattgccttcaaatccctattctggactgctctataaatctagacaagagtattatatattttgattgatattttttagataaaataaaagggagctgaaaactgaattgcaaactgaattttaaaactttatctctctgtggttaattgcaaacacagatacaaaaatatagagagagatacagttagtaaagatgttaggtcaccgttactaacactgacatagaaacagttttgctcatgagtttcagaatatatgagtttgattttgcccatggattttagaatatttgataaacatttaatgcattgtacaaattctgtgaaaacatatatataggatgtgcgaaaagtccctgtgtatcatgtgaaatggcttaaaacagaacaccataggtattcatatcagtgaataccataggtagctgaaagtgttttttcctggggtcgccaagatgaatgccaaaagtgatatcattattataaacaatagccagaataggttggtataaacctggtagaaagccttgataaattgactttctctcctcctgacatcctgccacccctttgctttgctgatgctcatttgtccactaaattaaactcaagcaagccctagtaaagtaatagaatttgtggagtcctcattagtataggaagtttccctgatgtgagattagtaattagagatgtagcaaaatgagaaagaagtaatatgcttagatatttcattttctctgaacctgtatatacaaaataggccatgcgtgttcagtaactattcactgcaaggcactctctaggtactttgggggaattggaaattactcacataaggctatggattgtgccatttgtcaaaagacaaaatgacaacaaatttagtttaaagacctcagtcagctttattttctattctagatttggacagtccttcatttcacaaattggagtaagtgttccaataagttgagcaaaggagcttggctttatagacccaaaaaaagggccaaaggaagcagaaacaaagaacaataagagaattggtcatttcaaagttacttttcttgaaaggtggggacaaggagacagaataatagaaaagtcactgattggttaacattggattaagaattaaaacagaggaaactttaagattgaagtttgaaactgacttgtttgggaaatcaggctgtcttctttcttgatttcttagaaggccggataacaactgagttttgctttggtgaacatgggtgactccatttttacttttagtctggtctgttgaggcctcgtgagagagcttaatctaaaacaatgacttcctataatttttgtttgacacatccaaagagggactctaatatttattgagagcttatcatatcttaagtactgtttaaacacttttatttgctattacatttgatcttattataactctaaaggcagaaatgattgcttttattttccacaatggaggaaactgaggttcaattaagtgagtaaggaagcagggatcttaaacccagataccattgctcctctttaaaggtggaagaacagaaaacatggggcaggggaagagagaaagtttctgtcccaggacatgataatctaaaagggaaaacgtaagatccactgaaacctgaggcagatttattgtggcaataacaaagcttaagtttcacagaccttcatttgcctgagccaactttgaaggccatgtatctaattttgtttttataattctataatctttattcttgaaaagagccctccctccaaatttacaagctttgggcccccaaaatccttgaaatgcccttgaataagagatatccaggtaaatgctatgggaattcagaggaggaagcagttagtatcagttggcggagagttaggctattaagagaaggttttatataggaagtggcatttagaatgaagctttgagaactgagctgtgtatttgaacaagtaaaggtggtgttgcagaattttgctccttagttctattaaaaacccgggttcttgtcacatgatccggaaaatttaggcacacagatacattgaagcatgagtagagcaggattttattgggcaaaaaggaaaaaaagaaaactcagcaaatcgagatggagtcttgctcacagattgaatcccaggccaccacaaaggaactgaagagatcgggcttctcccctgcataaggtgcaaattccccatggctccacccacttccccttagtgtgcatgtggggctccagtccacggtgggcatgcccagacaagccttgggcaggttccctcatctgtgcaaaagcatctgatgtaaacacttgaggggtggttcggagattctctgggacccttttattttcttatctgcctaggcatttggctgtctcagtgggtgggaaagggtgctccaggcaaagggcataacatgaggcaaagggcatgcacagaaaacagtgactggttcagtcaggttgggggatgccaaaggaagtaatgggagacaagattggagcaagatagataagagattgtggattttttttcttttttatctatataaatacagagacagggtctcactatgttgcccaggctggtctcaaactcctggcctcaagtgatcctcccacctcatcctcccaaagtgctaggattacaggcatgaggcactgtgcccaacctccaattttggattttgagagctaaagcaatatagtcgaaaactcagataatccaggtagattttgctattaggtgctatttggttcctggtacagagctaaaacccttggaatttcctaagtgataagagctacaggagcatcttttgttatatgtttccccccctagttcctgaaatagctctagagaaatacaggtgaataacatcctttgttattcatatcaagcccctatcaaccataccccagtttctatttatgaagtggcttttgggaagtccctaaagacaggagtggggaaaggctggttgtcagggggatgggttgaaactttcatcttccccccttgacctccagggagggatgagtggctgaaaattgtgtaaaatcaacaatggccagtgatttaatcaaccatgcctatgtaatgaagccacccgataagccttaactggaactttttggagagcctccaggctggtgaagacattgaggtgctcagaaggtggtattccagagagagcacagaatctctgttccccttcccacattcattttgctatgcatctctcccatctggctgttcttgagaggtatccgtttataataaactggtaacctagtaagtaaactgttaccctgagttctgtgagccattctagcaaattatcaaacctaaagagttcatggatacgtgcaatttacagatgcacagtcagaagcacagatgacaatctgggcttgccattggcatttgaagtgtgttgggaggcagtcttacaggaatgagcccttatcctgtggggtctatgctaataacagacagttgtcagcattgcttggtgtcgaaaacccacattgttggtgtcagaagtattgtcagtaggatagggaaaacagtttgttttctttttttagtggtctttggtcatctttaagagcagggcttctcaaagtgtggtccttgaaccagcatcacctgtaccacgtaagaacttatgagaaatgttcattcttgggccccaacaaagaattaaaaattctgagggtgtgaacggggtctgagtttcagcacaacttcccgaccatgctgatgcattcttgcccaagcatgaaagccctcccttgtttaagaaggccattagggccgggtgtggtggctcatgcttgtaatcgagcactttgagaggacatagtgggaggatcacttgagccctggagttctagacaagcctgggcaacatggcaaaatgctgtctccacaaaaatcacaaaaattaggtgggcgtgtgttgtgtgcctataggcccagctacttaggagactgaggcaggaggatcgcttgagcccaggagattaaggctgcagcgagctgtgatggcaccactacagcctggatgacagagtgagacactgtctcaaaaaaaaaaaagaaaaagaaaaagaaaaaagaaaggaaaatgaaaaagaacgccattaggtataaaggagcaatggtaaaagaccagttgcaaaaggttagggaatgggtggttactgaaataagaagctatgtagaacactagtgttggtggcaggaagtagaaagcaagagcactgctctgtgggggatggtcatagcaaatgcaatatggaggcatttgcctctgcactgaggagaaaactatcttttccaagataggaggaaaggagataagtggaattaaagagaacctttgagcacagagttgggaaactgaaggtatttgtgttgtgctccctcaatcttttaattcaactataagctaaacccatgaaacttgagtagtttcagttatctgacttttttcttctcttttgatacagtgttggctattctgggtcttttgcctctctttatgtacttaagaatcagtttgccaatgtatgcaaaataactggctgggattttgattgtgattggcttgaatctatagatggagttgggaaggactgacatcttgacaatgttgaagcttcctattcatcattatgaaatatttctccatttgtttgattctttgatttcttttatcagaatttagttttcctcatatagtcttttaaaatattttgttatattttgttcaagtattttgtttttgaggaatgccaatgtaaatggtattgtgattttaatttcaaattccaatttttcattgctgttatataggaaaatgattttttttgcatgttagccttatatctttcaactttgctataatcaattattgatagtttcaaggattttttggtcaattattttgaatcttctacatagattatcatcatctgaacttagttttatttcttccttcccaatctgtatacctttatctccttttcttatttcattagctaggacttccagtatgatgttgaaagtagtggtgagaggggatatcttggtcttgttcttgatcttagtgggaaaacttcaagtttcttatcattaagtatgattttagctggagggtttttgtagaagttttttttttttaagttgaagaagtctccttctatttttagtttgctgatttttaaaaagaatcaggaatgggtgttaaattttgtgaaatgcttttctgcaactattgatttgagcactttatttttcttctttggcttgttgatgtgaagtacattaattgatttttgaatgctgaatcaaccttttgtacctgagattaatcccgtttggttgtggtatataattatttgtatacatgttgagttcgatttgctaatactttttgagaatttttgcattggtgttcatgaaaaaatattggtgtgtagttttttgtgacatctttatctgcttatggttttaaggtaatgctggcctcatagcatgagttagggagtatttcctctacttttacatttgagaagagattgcagagaattagtaaaattcctactttaaatattttgtggaattcaccagtgaacccatctggacctggtgctttctgttttggaaggtcattaattattttaaaatagatataggcctattcagattacctattttttctcatgcgagttttagcagattgtctttcaaggaattggtctatttcatttaggttatcaaatatgtcaacgtagagttattcatagtattcttttattatccttttaatgtgcaagggatctgtagtgatgtccccttttttgttttattgatattagcaatttgtgtcacatcttttattttgctttgttagccaggctagagatatctctatttttgatgtttttgatgaaccaactttttgttttattgattttctctgttgatttcgtgatttcaatttcatgatttttaaattatgcttacatttgatttaatttgatcttcttttgctagttatccaaggtggaagcttatattgttaagatccttttgcattcttatgcattcaatgatgtaaatttccctctaagcactgctttttctgcatctcacaaatattcatgagttgtattttcatgttcatttagtttgaaatatttttaaatttctcttgatatttctcttttgacccatgtgttacttagaagtgtgttgtttaatcaccatttttaaaaattttctagctatctttctgttattgatttctagtttaattccattgtggtctgagagcatatattgtataattttaatttttataaaatttgttaaggtgtgatttatggcccagaatgtggtctatcttggtgaatgttccatgtaagctttggaagactgtgtattctgctatatttgaatgaggtagtctatagacatcaattatgtccagttgattgatggtgctgttgaattcaactatgtccttactgattttccacctgctagatctgtccattctttgcagagggacactgaagtctccaactctagtagtgaatattctatttcttgttacagttttatcaacttctgcttcatgtcttttgatgctttgttgctagaaacatacacatgaagaattggtatgtcttttggagcatgacccatttatcctcatataatgcccctcattatttcctcgccctgatgtctgttctctctgaaagaaatatagcctctccaggtctcttttggttggtgttaaaatgacttaactttctttatcccccttacttttagtttatatgtggttttaaatttaaagtgggtttcttgtagacagcaaatagttcagagttgtttttcgatccactttgacaatctttgtcttttaattggtatatttggactattgatattttaagtgattattgatatagttagataaacatctactatatttattactgttttctgtctgttacactacttgttctttgtttatatttttattgtctactctttttctttccattgtggttttaatcgagcattttatatgtttccattttcttttcttagcatagtaattcttctttaaaaaaacattttttagtggttgcccctagagtttgcaatatacatttacaactaatctaagtccattttcaaataatactaaataatttcatgtgtagtgcaagtaccttttaataataaaacactcccagttccaccttccagtctcttgtattatagctataatttagttcacttacatatatgggtatacctaagtatatacattatcatatttatgattgaatatattgatgaaattattttgaaaaaactgttatcgttaaatcaattaagagtaagaaaaatagttctaattttattataaaatgaaataccttcatttattcattctctaatacactttctttctttatgtagatccaagtttctgacctgtataattttccttttctctcttcagcttctttgaacatttcttaccagccagacctactgacaacaattttccccaatttttgtttgtctgatagagactttatttcttcttgacttttgaagaataattccacagggcacagaactctagattggtgatttcttcccctcaaacccttaaatatttcattccactgccttcttgcttgcattgtttctgagaagttagatataattcttatctttgcctttctataggtaagatgttttttcctctggcttctatcaagattttttctttatgaacatgatatgcctttctttttgaacatgatatgcctttctttttgaacatgatatgcctttgtgtcggattttttttggcattattctgcttggttttctctgagtttcttggatatgtggtatggtatctgacactaatttggaaaaattctcagtcattattgcttcaaatatttcttctgttcttttttttcctttattctccttctggtattcccattacatgtatgttacagtttttgtagtcatcccgctgttttggatattctgtttttttcagtttttttttccttcgcatttcagtgttggaagtttctattgacatattctcaacctcagagattctttcttcagctgtgttcagtctaccaatgagtccatcaaaggcattttacatttttattacagaatttttgacctatagaatttcttttgattccatctttgaatctccatttctcttctgcttttcatctgttcttgcatgttgcctactttttccatgaaaacctttagctttttttttttttctttttgaggtggagtctcactgttgcccaggctggagtgcagtggtgtgatcttggctcactgcaacctctgcctcctgggttcaagtgattctcctcctcagcctcccaagtagctgggattacaggtgcctgccaccatgcctgagtaatttttgtatttttagtagagatggggttttatcatgttggccaggcgggtcttgaactcctaacctcaagtgatctgcccaccttagcctcccaaattgctgggattataggtgtgagccaccatgccctgcctttagcatgttaatcatagttgttttaaattcctgatctgttaattccaacatccctgtcatatctgactgtggttctgatgcttgctctgtgttttcaaatggtgtttttttttttttgccttttagtaagccttgtaattttttattgaaaggtggacatgatgtgctgggtaaaaggaactgtagtaaataggcctttagtaatgtactggtaggtgtagcagagggtgagggaagtattctgtagtcctatgattaggttttagtcttttagtgagcctgtgcgcctgcagcttggaagcacttgtgaagtgttttttcaccccttttggtgggacatagtgactagtgtgagcgggagttgagtatttcccttcccctaggtcagttaggctctgaaaaaaccctgataggttaggcatggtaaaatagtctcttttgagggcaggcattgttataagaatagaatgctctggggccaggtgcggtggctcacgcctgtaatccccgcactttgggaggctaaggcaggtggatcacctgaggtcaggagttcgagaccagcctggccaacatggtgaaaccccgtctctactaaaaatacaaaaatcagccaggtgtggtggcacacacctataatcccagctactcaggaggctgaggcaggagaactgcttgaacccagtaagtggaggttacagtgacccaagattgtgccactgcagtctagtctgggtgacagagcaagactccgtctcaaaaaaaaaagaatgctctggcatatttgaaaatggttacttttccctttttttctctgatcttcactgtgagaacctggtaagcatcctataggcaaaattcataaaagtatagaagtcggccagtgacttggacccacttggaattttcttgctctcacatcatgcacactgaatctccagcaatttttcacttacagtttaggttttcctaccctactactggttctctcagaggtttctgcttattggtttctgttttgtaagttgtgattctctgtacctaactgcctgtctcccattttggggggcagtggtttgccctgtgacctcacttctctgacagatctaagaaaagttgtttatttttcagtgtgctctgctttttacttgttacgatgaagccaaccactttcagaatttctacaaaccagatcagaatctggaagtcctgtttttttattttttttatccctttgtttagcatgttacctatcttaacacattttaaataagtgaatgcatagcttatatctacttctaggttatatgcttccttagaataggaattgattcttaaaatgtcgttctgctcacgcctgtaattccagcactttgggaggccaaggcaggcggatcacttggggtcaggagttcaagaccagcctggtcaacatggtaaaaccctgtgcctgcaaaaaatacaaaaattagctgggcatggtggtggccatctgtaatcccagctactagggaagctaaggcatgagaatcacttgaacctgggaggtggaggttgcagtgagctgagatcgcgccactgcactccagcctgggtgacaagagcaaaactccatctcataaataaataaataaataaataaataaataataaaaataaaaaaataaaataaaacaaaaattttattctgagcagtctctgaagaatataaattctactgccttgcctttagaacttataacagcatctcgcaaactatcacaagatgctccaaacatacttcttatgtgctgaattaagaagtcaactcaaatttagtatactagtaatatttttggatatcccaaaacactgccagctcagctttaggctgcccttcttgggggggaaaaaagcagttgaaatttaggacttaagtgggcatctcgtttaatttttaatggatttctatgttgttggttatggtgaagaggtgaaaagaataaatattctgtgcagaaaaattattcagtcttcatgtgaaaacactttgtccatagcaattactttatgaaaaagatgtggtattactttctttgctcttaactgagacctttaatttaaagaacctatactttacaagtttttattttcaatgcatgaaaaatgtagcagctatttcacaacctttacttttaaaatccatttttctttttaatctcaaatagttttttcttaaaaccttttgactttttatctaaattgtaatagccagagcaccttcccacaactagaatatctcatcctttttgtcttttctttttcctctcaaaatgcctactgggaacttaatttggagtcagattcttcatgataaatctggacttaatcaaaattcctcatatggtatattgtatatatcacagtactggatagtcctctgattaaatagatatttgatagtactttaaggtctatacttttggatgaacttaactgctttctccatttgtagtctcttgaaaatacagaaatttcagaaataatttataagaatatcaaggattcaaatcatatcagcacaaacacctaaatacttgtttgctttgttaaacacatatcccattttctatcttgataaacattggtgtaaagtagttgaatcattcagtgggtataagcagcatattctcaatactatgtttcattaataattaatagagatatatgaacacataaaagattcaattataatcaccttgtggatctaaatttcagttgacttgtcatcttgatttctggagaccacaaggtaatgaaaaataattacaagagtcttccatctgttgcagtattaaaatggcgagtaagacaccctgaaaggaaatgttctattcatggtacaatgcaattacagctagcaccaaattcaacactgtttaactttcaacatattattttgatttatcttgatccaacattctcagggaggaggtgcattgaagttattagaaaacactgacttagatttagggtatgtcttaaaagcttatttgcgggaagtactctagccttattcaacagatcactgagaagcctggaaaaacaaatcccggaaactaattattatgtgccagttatataaacaagaagactttgttgggtacaaaccagtgattccttgcctttgaaaaatgtgtcagatatcatgcattaccagcagttcaatgatataaggaaaccagagtaatagctaaaacctttaaagctaaaccaaagatttacaaattgcctcttcatccagtctttcccaacctaaaaactgagttctctaaaaattttagtatttttttctgaagaaaagggaacatggacatttatctaatcctcattagaaatctgactaatgataacaaggatttagacctcaagcacttcttaccaaaattcttgatatgaccttatagcaaattactttcacctgttgaactttcctttcttttattcccctgtacctcacctgcactgggcatattcaagttgcttatacaacactttactattgtgttagaaaaatcatgacacatgatgaatgtgtttgtgcaacatgagctgattcataaatgaaaatgtgcattgaaattccacaatattttaaaattaggagtttatctagcaattgaacaaaattgattaaatccattatttgttagatcagctaaattacataagttcattcatctgctcataaatccatccattcttccatctggctatcccttagtcaattcaaataaatatttatggggcactttgggtaagccaggtgctaagaattcaatgcaaaacaagatagactcccctgtccttgttgaacttatatttttggtacaaacaaaagcaataatcaagaaaaaataaaaaaagtactgattgtgattaataatatgaagaaattcaacagagtattgtacttaacatttgattgatctgattttctcagttgtctgagaacaaacatttgtgaaaatctcattgtagagttcttacgatggatagggggtcaactgtgtcattattgcttatcagcttatcccaaagacctagtttattaccagattgcaaatagtgttcaataaattattcttattaagggttgttatgtactctaaaacatttattgtggtcccttcactggttctggtttacaaacttacttttctatgatgacatagtatagaaattgagagtgaatatttagaagttcatttttattatatatttttgaagtattgatatgtagtgaattagaaatttaaaaagaaaacaaaactgtccttcactacagattgaaaagcattatactaaaagaccatttgctcagttatagtatataaaggccaaatgacttaaaaacaaattatgtaaggagaaggaaacaaccatttattcagtgccactaactgtcagccagttttttcagtggtcagttaatgactgcagtagtgttctaccttgctcaaagcaccctcctcaagttctggcatctaagctgacatcagaacacagagttggggctctctgtgggtcacctctagcacttgatctcctcatgcagtgcatggtgctctcacgtctatgctatgttcttatggtctttaggtaacaagaataattttctttcttttccttactatacattttgctttctgaaattcccttctcgccaatccaggtgaatgtcagaatgtgatttgacaactgtccaaagtactcattcactgaggagtggtaaggccttcgcccaacctgccttctctgggaatatactgctgcctgaacatatcattgtttattgccaggcttgaacttcaccaaattaatttattagggtcaacatctaaatattagaactatttcagattaatttttaagtcgtatccactttgggtactagatcaaattgcaggtctctgcttctggcttgagcctatgtttagagatgatgtgcatgaagacactctttgcttttcctttatgcaaaatgggcattttcaatctttttgtcattagtaaaggtcagtgataaaggaagtctgcatcaggggtccaattccttatggccagtttctctattctgttccaaggttgtttgtctccatatatcaacattggtcaggattgaaagtgtgcaacaaggtttgaatgaataagtgaaaatcttccactggtgacaggataaaatattccaatggtttttattgaagtacaatactgaattatgtttatggcatggtacctatatgtcacagaagtgatcccatcacttttaccttataggtgggcctcttgggaagaactggatcagggaagagtactttgttatcagcttttttgagactactgaacactgaaggagaaatccagatcgatggtgtgtcttgggattcaataactttgcaacagtggaggaaagcctttggagtgataccacaggtgagcaaaaggacttagccagaaaaaaggcaactaaattatattttttactgctatttgatacttgtactcaagaaattcatattactctgcaaaatatatttgttatgcattgctgtcttttttctccagtgcagttttctcataggcagaaaagatgtctctaaaagtttggaattctcaaattctggttattgaaatgttcatagctttgatagtgtttttcagaagaccaaatttacagtgggagccttgggcttttgttttttaacagctcttttttgttcctgcttcagtggcctgacctccaagttagcaatcgccaggttgagaaatgctttgcgagacataacagatgctcctgaaataacaaacacttggaatcatgaggtagtggaattgaaaatagaaagtgtagtgattgttttttgttatttggatgggatgaacaatgtcagattagtctgtaactatttttttttaatgtcactctgatttggtcacaaaggatctctagtctcattgccttagtatcattctacgaattagaatgtgttactgtgtaagagcacttcttgtatatgagagaaatagcaacagttccagtttaaagtgatataaatggaaaccaagaaatgtctttactgggaccaaatctggacagcatttactgtatttttgctggtattttctctagtctttccgggtatattcacatttaatgatcacttttctccctttgtgctaatggacactgaatccattccactaccatagttcttgctaatactactctactttttacacaaaattaaaatgccaggagcacctccaggtagactgactataaatctagactgaaaaaaaagcttgtatttcttaacagattaccttgtggaacatttgctcctttcaactaatgaggcactaaatattgtaactgctcaactggtgcttttaatttatttgtctagactttgtcatgttgccagaagctttatcctggttggagttttgaaaacagtattgtttcttcagaaagaaaaaagggattgtcagatgatctaaaaataaagaaacactggaaatacaagtatcccaaggtgatagcattaggcaagataaaaatgttgaaaagcgaaaaagaactggttgatagagaagtgttgttattcagtagaacctaagtcttgtggtcccatttttaatgaaaaatggtgaattttttggtttttattgttcttgttcacacaaatctgcccattagaataagccaagccctaaaaattaatttcagtttcactgggaatcctttagtttatctactatgtagtagagaggttttgttttattgcatgtttgacgtaggaacgtatatatgcaagacatggaggaaaaccaagtgggccagagttttgaaaattctttatcttttctttctgccaaagtgagtctcccaagtttgtcttttttttttcatttccactcttctatggtttctagcattatataaaccaaacaaaaaaaatacgttcagagattccttcagaaatgctggatgatcttgatatcgatgcttttcatatatgtgtttatgatgctggtttctggggctggctctcagtatcacaaagatgtctgtaaacagaatatgctatttcttctttgtgacaaattttgaacattatgtgaatgtccaagaaagagcaaaagagggcaaacttctcatacatttttgatgtcgaaaccaagagacgcttttattttcctaacttttctttgaaagttcaaattaagtaattttatcctgtcctaaagtttaaaaagaaaaaaaaaaggaagaaggaattaaaaatccaaagaaaattatgtttgtttgcttttctgtttttttcttccttccaactccgagactttgcaagggcatagttctgaagatctctgacactgagacattagagatctctgtatcaatggatcatttgttttcagacatatgaaacaggaactttgaacaagaaatttcccctctttttctcatagtgatcctgagacatcagctgtggaatcacaacacgtcattagttttggcaggtccttgcaggtgttttgttttgttttattaatgttcttccctcctgtagctagacagcaatcttggagaatctgccagcttggaagactattgtgtaaatttcaaggtggagcctcctttaatttgttctgtgttacctgtgagctgtgaggtcatgaagaggagacaatgaggctaatcatgagagccccattggtttaggcaattagaacaacaagatctaaaatggtttattagccttgaattgtgttaagcacataattcataaaaaacagaaaaaatatttttaaatgtatgtctaaatcttcagttacaagtttgaaaggtgacaaactattctgaggaaatgattaggcctattcttgcaacgagtctttatgatctgaaaagaatctatgtccacacataactcccacctcaaagatggggcatcttttgctctgggagatatcaaatgcgaccaaaacaagtgtttgtagatttgaatgatgattcagcagtgtagcagttctcactcattttataataattaacaacttaataattaattattaaactcctacatgcttaacattataagtatgataacttctgtggttacataaaagatatacatagcacttgtccttgatctgtcacagtgaggtcccaatccaacctatgagcttcaaatgaaaagttcaaaattacactcattgtcataagtcagagatcaaaggaagaaaggatttaaccaaaatgataaattaaatataggtgattaaatatagtcatggttcaaggcatgggccagttagggagtgtgatgtgggtaattatgaaaggccagctcccaagccctgttgttgctactcccccacatcagtcatccttcctttttttctacttctactgcagtgccttcctcatcttttcccttgcatccctccattatatgagtcatacaaattagacttttcaaagcaacattaacattgtgtgaatttggggtttttgactaatcccaacattccacccccacattccagtcccacatgggatttggagccttgtttataaacctggcacttctaatatatcttatcttagagtaatccttgtatttgtttaatttccacttagcattgtaaatacttgcaggtatcctagttaagaaagcaaggtttaaacacaaaatcatcaccaattaaagcaggctagataaagaatgtaatagaaatgctagataaaacagattttttcttactaagttttctgtcccttatagagtgcataacacaataacttgcttgataagaattcaatgtacattgttttgtgctgaatcactaaatgcttgatttctgtaacaagagattgtggttccatcagtatctggattttagtctgtgtaatcttaggcaagttatttgatttctctgtgcctctgttttcttgtctgtaaaatgagtataatggtagtaactaattcattgtgtttttgtgaggattaaatgagttaataactagtactcctccctggcacatagtaagtacaatatgctgtgctgtggtggttgttattattttttatagttccttgagcaaaagaaataatgtccccatcttagtataatattggaggtatataccatagaagtgaacaaaagaatatagtttcacaaagaaagtgataattaaggcggttcataaagggtcataaagcttgtagattttagaaatgtgggggcatgaggatgtggagagggtattccaggatgccagacagggagattatggatgagtactaagatgagaactagaaaaagctgaggggcaaaaggtcagaggaggccacaagttagggagtattaggaaaaagaagttaatacttgacaagtgccaacatggcttcacgaggaatgggttgggcctttttgagtgaggaagaggctggtgaaagggtggtggaggacactgctgctgctgatggcatggggtgtaggtggcaggagaggcagggacatgagctaggaaactctccagctatgaagtgatgagtctggagtaatataaggacagtaggggtggagtgctgaacttaagggaggagagaaaaataattggtatggaagtaggtacaatgcaattttattatttctgagcctaaaaatgtgaaatttttgattatttggtcagaccagggaagtattttcttttatgctatctctgaaaatgtatacactaaaaagttgtagtataaaaaggttgtaaagcattaagtaattttagaggaaacaataatttggatattttacatgcaatcatttatatgcaaatatatgtaaatattacaaaattattctctatttgttacaaaccttaaatatttttgactgaggaatattttattcatctaattatagctactttgttctaactaatagatattcttgaaaacaaagcaacacttttttggagacagagtcttgcactgtcacctagacttgagtgtgttaccttgaactccagggctccagtgatcctcccacctcagtctcttgggtaggtggattacaggcccacactaccatgcccagctgtattagtccatcctttcattgctataaagaaataccggaaactgggtaatttataaagaaaataaatgtaactggctcacggttcttcaggctgtacgggaagcatagcagcatctgcttctgaggaggcctcaggaagttttcaatcatggtggaaggcaaataagaagcaggcatgttacacgacgaatcaggagcaagacaaagtgagggaggaggtgccacacactttgaaatgagcagatctcatgagaacagcgccaagaggatggtgctataccgttcatgagaaatccacccccatgatccagttacctcccaccaggccccgcctccaacactgggaattacaattcaacatgagatttgggcagagacacagatccaaaccataccaccagctaataccaaaaaaaaaaaaaaattttttttttaagacatggtcttactatgttctacaggctggtcttaaactcctggcctcaagtgatcctcccaccttggcctcccaaagcactgggaattcagacatgagtaacagtgcctggccaatacttatttttaaacattctctaccataaacttaggatcttgatttgttcacattgaacagatttttattatacagattgaatttataagaaaatgttgcagacattgtcaaaaagggacgtccaaaccactgtgatatttataagcatttgggccacattttgatagaactatacacggagtgtgtgtgtgtgtgtgtgtgtatatatatatacacacacacattatttatatatatgtatatatgtatatatatatatgtatttatatatatatgtgtatatgtatgtacacattatttacctacctactgtgtgagtgtgtgcatatatacacgcacacacacacacacaaatatatatatttcccttctgagacaaagccaaacagcactgtatgcttaaagaaaaacagtcacacttcccacttatgtaatttatattacatccagtcaccacaccagccaaactgctttattgttttttgtttgacatccaatgctaaagcataatgcctgttgcagtgaaatatacatgagcaaccctgagaactcaatatagcctcacgtgttgccactgagttgagttgaggagtcaagctgtagcaaaaaggtttgtcaccgggtgagtaatggtgctcttatttttctctgggtctcaagaagtgctctttatgacatatatggcattaaataaatatcagatatttgcacatcctaactttcctattggtgaagtttcttaaaagagagataaagggccattgtgtgattgatagtttcaggtatatttttgctgcacagtcagtccgagtgtaccacgtagggcaaaccacgtaacttctcagggccttgactgtttcatttgtaaaccagagaaaaggacttgggtgacctccaaagacctttcaaatttggagatgagtttgtggaaagttcaaacagtttagaaaacagaactaagacacccactggcacccctggaagcaagagagtgccaggtactatttgtaatacaggaatgaaatacctaattgtatgaaattgaattctaactgaaccagtttgttcagttaaattttttttttcaattagagtgcttacttcagtatctaacactagacagtaaactgtagacaaaagacctacagaatttctgaatggtatcaaattcaccacacttaaaactttgggatgtctaatttcaaccaacagctttctttcttcataatgttgaatatatgtgtatctattttagctaaatttaatatatatcaatatactttgatagatattttatataaactattagactatagtattatgagtaaaagacccaccatttcccaagcaattataaagaacgatcaaaattttaatgggttgttagtattatttctttaaagattgtgatactgataaatatttggccacattttaatagaattatacatgggatgtgtgtgtgtgtgtgtgtgtgtgtatatgtgtgtgtgtatatatatatggcagtagagatatatatatctacacacatctagatatatatatacatgtatatctatatatacacacatatatctgtgtgtatatatacatatgtatatatacctacatacatatgtacatatacatacatgcatatatctgtacatatatatatagtgtgtgtgtgtgtatatatatatatatatatatattttttttttcctgagccaaaacaaaatactaggttgtaatagctgttctttcagaaggaagaaaaacaacatgtgctgaactctgagtttgatgtttttgtattttacttcctattttcatatcagtccatttatttattcaggaagaatttattgagcatatattatgaacacagcttttgctaaggacagggtatgcagcagttatggcctagtaggagatatggatgttaaaaacaaaatgctcacaaatgcacatataatcttaatactcattgtaagctatgaaagcagagtgtgagtattatgagaccatatgttgggagattttatttggtattgaggatcaggaaagatacccctgaggaagtgatatttaatttgaaacctaaagaaagcagttggccatgggaagaaggtagggaatgagattcccaagcaataggaatccaatgtgtgaagaagctgagggagtgaaagaaagctagtgtggtggcaggaagaaagagaagagaatggagaagggcactaaatgagtcagagaagtaggaggggctaaaccatgtagggtcgtgtaggccatcttaaaggcctgagtgtagtggaaaacctttgaaggtttgttaaaaggtcaatgaaatgttctaatttctgttgtagtgaattgctttgattgctgaatgcgaatggatgggtagagatgcaagagtgaaagggaagaaatcaattaggaggctcttgccctgctccagataggactgataattaattttatttgggaagatcagggagaaagataagtcatgaatgactcccaagtttctggattgaagaaatgaaggtaccatacactgagatgggaaagcctaggggtagagtagctttgagaagaaaggtagcatttccccatttcataaaacatggaagaacaaagaggctggattcctgtttgtagacataccttccaggccagaactgcattactacaacatctttgcaagccacattgcctttcataactctgtgtcagtgttgatgccgtaacatctttggccttccccctaccatcctcccgcagtcctccatgataatgccattattccgtttcaaattgtgtgcttccattggatgtgtgagtctccttgaaagttataatgaggctgtagcccatatgaaatgcttcaactcaggtcctgcataggaagaggaagctaatctctccaggaactgagcctgtggctagagggatggataattgtttaaataaagaatatgctgctgagtactgatgggctctttatgtacccatttggctgctgctgcccaacctttaatctttcctgagctttaaataggaaggaaaaaatggtccacaaaggatttgagccattttgctgtggtgatgaggagcacgggtttagagacaaacactcctgtgtttgaattccagctcctactatctcctagctaagtgaccttggacaagtcacttaccttctccaacctgctgtttcttcatgtacgtaataggatttacctcatgaggttgacatgaagattgaaagaggtaacatatagaatgagcctgtcccaggacatggttcatgataagtctgccataaatgggagctatgtgtcccacccttttggaggagataactgttctgtagcaggtaatatattgtttgatacttggttaacccttacaattatcatttcctgttcttctcaataatgctagaaaccttttatttaaagaaccacaatataaaatgaaaaatatataaaaaaagcaaatggaaaaattctattggcaaggctttttaactttatatactaaataaatccaattgcttaaataatgaactgactcaagttctcagcactgcttcttgtttaattctctttagtttttcagaattctccaataatgacctttgtctactctcttcagtttattcagaaattacttttatttacatagaagtttggaagtggatacacaaacatatccctcacatatcttatgatcctatgagtcatatactcatctcttatattccctctgtaaagcaatgtaggtacctttcaggaaggtgatttttatgtaggttgagaaatatcagcatggaggtcctagctgacctctctagagagtttctgagacatttgacaacaactttttctttaagtcatcagttatgccccggggtatgaaatttctaacatgatcctcagtaaacttggctgccttgctgaggatactctccatctgcctgagagacacagacaccattaattgggaattgacttgacttgtgtggttccttgtggaccagatggccactaaatattctcatttcaaggcaattggtaaaaactacacttcaagaaatttcattcttaattccccttagtggatgttattaaccaaaggcaaaagaaaaaaagggtaaaaaaaatattctaaatgttaatatcaaaaatattattttcaattcaccccaggcacagagaactaagtattattattgctattgcaccggcattccccaatgagacagtgattttcttttaagacatttttaaataatataggcagaattaagtagacggtgatctggtaagtagatgtttcagggtaacagctgtgcaatgctccatgcagggaattagattgtcattttattccttaccaggaacatacattcagttaaacaattatttgacttctgctcttccactgatttctaagttgaggctctctcttgtgcctgtctgatcagataagtagagttgtgccttggtttatagatgagataaatgtgtatttgaataagcataagttaaagaaattttaaaatcccttaggaagctaggcttatcagagaaatccaaggaaatacattaacaaactaggaatttgttctaacaggttaattataactcataaacttattgggtttttttaccttttaattttatattacatttgcttataataaggaatattgctaggaataaaattttttaatattctacaattaacaattatctcaatttctttattctaaagacattgggattagaaaaatgttcacaagggactccaaatattgctgtagtatttgtttcttaaaagaatgatacaaagcagacatgataaaatattaaaatttgagagaacttgatggtaagtacatgggtgtttcttattttaaaataatttttctacttgaaatattttacaatacaataagggaaaaataaaaagttatttaagttattcatactttcttcttcttttcttttttgctatagaaagtatttattttttctggaacatttagaaaaaacttggatccctatgaacagtggagtgatcaagaaatatggaaagttgcagatgaggtaaggctgctaactgaaatgattttgaaaggggtaactcataccaacacaaatggctgatatagctgacatcattctacacactttgtgtgcatgtatgtgtgtgcacaactttaaaatggagtaccctaacatacctggagcaacaggtacttttgactggacctacccctaactgaaatgattttgaaagaggtaactcataccaacacaaatggttgatatggctaagatcattctacacactttgtgtgcatgtatttctgtgcacaacttcaaaatggagtaccctaaaatacctggcgcgacaagtacttttgactgagcctacttctctcctcactggtatggctccaaccatcaggccctatcttggtccatttaggctgctaaaataaaataccaaagactgagctgcttataagcaatctttggaggctgagaagtcaaagatcaaggtgccagcaggtttgctgtctcgtgagagcatacttcctggttcattgatggtgctttcttgctgtgtcctcacataatggaaagggcaagacctctctggtgtctcttttacaatggcactaatcccatcatgagggctttgttctcatgacctaatcacctcccacatgtcctacattctaatactatcaccttgggggttaggattttaacatatgaatttgaggaggtggcgggggggacacaaatatttagaccatagcatttcactcctgacctccaaagttcatgtcttcttcacatgcaaaatacattcattccatcccaatagcccccaaagtcttaacttgttccagcatcaacttacaaggctaaagtccaaggtttcatctaaatatcagctaaatcagcacaaacagctaaatcaggtagagtgggacttaaggtgtgattcctctttaggcagattgctctccaactatgaaattgtgaaatcaaacctattatgtactttcaaaataaaatggtgaaacaggcacaggctagacagtcccatttcaaaaaagagaaatagaaaagaaaaaaggagtgacaggtctctataagtctaaaactttaaggcttgagaataatttgctttgctttgcctccaggctcactggggtggtgtcttacctctggacacactggggtggaggctctatcctcatggatttgagtgtctcattctttgtggcaggtctgtgctccaatcccacacctatggctccctgagtgtgcaattgcatgcctggtggttctactggtctgggattgcataggtggcccagccttcatagctccactgggcattgccctaatgtgggctctatgtggtgacctcacccctgggcctctacctgggccctgtgactccctgggttcttgaaatctaggtggaggcagccatccccctacagttgtgctgagtgtagtgcatgagtgctggggtctgctagagctatacctagggtggtggagatgtatggcaatggagtatggggagctgatatggtttgggtgtgtccccacccaaatcttgtcttgaattataatttccataatctccatgtgttgagggagggacctggtgagaggtgactggatcatgggcatggttttcccatgctgttcatgtgatagtgagtgagttctcacgagatccaatggtttcataaggcagttttccctgctcttgcaccctctttcttgcctgtcaccatgtaagacataactctttcccttccgccatgattgtaagtttcctgaggccttcccagccatgtggaactgtgagtcaattaaacctcttttctttataaattacccagtctctttacagcaatgtgaaaatgtgctaatacaggagcaaagactgcagtgtgaggtggcaatgtgaagtctgcaatgtgaggtggcacggggcagttgtagcccctcctttgaaatctttcttccctaccccaggcctctgcactctgaactatgatgggaaaggcagcttggaagatctccaaatggctttggagtcattcttccattgtcttggactataaattctggcttctgtttaggtggctgactaatatccccactgtctgaatgcatagcacctagtttctgttgagatggctagtccatagtaatttacttatcaaatttggccacaccctttgtattctctcctgagcaggctttctcatctttcacaatatggataggctgagaattttccaaattttgaagttctgcttcccttttgatcaataattccattttaaagtcatttctcatcttgaattttactatgagcagtcaagagtaactaagctgctccttcaactttgcttggatatttcctcagtcaaacattcaatttcattgctttcaagttctgccttccacaaaacactaggacacaaacagctcagccaagttctttgacattttataagaaggatagcttttcctccattgtccaataacatgttcctcatttccatctgaaaacccatcagattggcctttaccgtccatatttctgggaacattctgctcatgaccacttaggtattcggtaagaagatagtagctttctctatagctctcctcctctctggagccctcaccagaatggcctttaattgtccattcacagcaatgtaggctttttctagcatgtacctgaaaactcttccagcctctactcattaccttgttccaaagctgcttccacattgagtatttgttacagcagtacccagatcccagtaccaatattctgtcttagtccattggggctactacacgatgtcttataaacaacagtaaaatttatttttcacagttgtggaggctgggaagttcaaaatctggtgccagcagattttgtgtctggtgaaggccttcttcctcacagatggctgtgttctcactgtgttgttacatggcagaagagtgggcaggctagctctctgggatgtcttttataagggcagtaatccaaatcatgggtttagggtagagccctcatgacctaaatcacctcccaaaggccccacctcctaataccagcatctttgaagttaggatttcaacatatgactttggcagggggacagaagctttcagtttatagcaaaccctataggtagcactactttgtcctttcctaatcaatttgcgtcaatgaaacatgaattagaagagacctaggcgactccactatactgggattattcccagtataaattatcatctctccacaccttctcatctactccctatctgagttctgaagctctccactacaagaaggaggctttggtttgacttgatatacttctctgggaaacaggtttagcataaaacagtgatgctcattctagaacacctgcaaatgacaatagttttctttcgaagtcgccaggaatcgtctgcctttgggtatgtggctgtgagcactgccgggcaaaatgccatatgacctagatgaggcatatgccatcctttgaagccattaggacattatataggaaatatattaactaaaatggaataaaattttctaaataacaccttatgtttatccaacaggtggttcattatacttgagagcattatacagaggaatttgatggggaggagagctggagaaattctcgaaattctgggtttctttaacagaatactctagctataaacttataattttaaaaaataagcattatattaaagaaaagggaacataaattattttgttttattaaacttaagtccaaaggtctggattgtggcagaataggatcaggggacctaaaatgttgagcctcaaaggtcttcttagagaacaactgtattccactattagcgcttttggtccttttagcccaatttctgtttatcccaaatgttcttcccttttctgccttccttcacagtggaccctgccaggagctttgaaatgcctgtgagtgttaaacacttacccattgagtgcccaaccttaacatgcccctaataaaatgtacttagattaaccgttttcattatcaaagtttccttattacccaacaaacacaggcgctttaaagaaaacattaactaaattgcaagtgacacattttaagatctttgatatgacttcagagaatgcactataggaacacaatgcaatgggagggaaacttgggagggaagacattagcctttataaaatctgcaagtattgccaaatcaaaataaaatttacaggaaagcaggatcataaatataatctaaaatcttagaacctgtggttatgattttaaatactaatacaatgcaaaatttttacctgtttaggtttttatttcatcagttcatatttaggtatatacttttactgttctccttttttataatttaccattcacaaagatgatgatgttagtctaactttaatgtcatgagtgctttgagtagtagtgctaagtttttgttgagtagtagtgtgcttttttgattagtagtgataggtttttgatgagtaagcctgctagcagcatacaaacaaacaagcaagtatcagcctagagaagcagaaaaggcatttgggtttcaaagtcacaaggcctaggctttagtctaatacagctgataatacaatttgtccaaacaggacatttttgggtgtgtcaaacactaaactggacaggacattatgacaaaagtgcaaagcaggactttccggggcaaaccaggatgtatgtcatctcactgagtcctctctttgtccttgccatgactagtatctctagaggtaaatgaacagagtaatgacaaatagccagacacctgaatcttatcccaacagcacctcctacataattccccattatcccaaatggaaattaaaaatatatacagtgataattccaggccaagaaatgctttatttctagcttggacttggcttccatgtccagtgtagaatcttatccttgctgatctggactgtatctcatgaagccatgacttgtacctagttactagctggaaggcttagaacaaaagctggtccagagagcctcctttttccttatttcctgggtccacacctttaccatggcagtctgcctatcatttgatggaggaatttaaagcaagtccaagggaagggaagagagtttctaaaatctagaacttggatagtttaatttacctatcccaaaacagcttaggcccagacagcttctctccaagattggtgccaaactgaaattaccagctgtgtagaccaaagagaatttcaaaagaaactgaatcccaagagaaaaaaaaaagacttctggcattgtggcccaataaattggtaggattgttgtgacttttcaagtttacatgtaaaatgggcccagcgcagtgcctggcaaatatgggtactaagtaaaagtaactataatcatgtttttttaatctggacttcacttggtcatcctttaaatggtgtctgacagaatcctagttcttgtctcactttacttagtttccctgggaaatttcatgtgtccttttggctttaattaatatctctattttgatgacctccattatctgcctattcccagagctttccacctgatatctcagcacatgaaaagcaccttatgtcaataagtgagttccttccctgccccaccacatacctgtcctgtgttcctaattccactgaatggcatcccatcctccagtttcccaaggccaagacctgggactcatctttcactctcaagttcctccacgggtacccacatgtcacatcctgtcaatgctgtccctggggagtatctgaaatatattcacttttcttcatttccacctgacaccactattaacacttgcacaaatttctgaggttcctggctcatttccctcattgacccccaatagttcattctgctctttgcagctctggtgatctttccaaaccccacatctgatcacttgtttcttcccttcatatggctccttaatgccttctggactaagtccacactgcttaaggtggcttaccaggtccttcatgattttgtctttgtttggctttctacactcactgcccaacttccccttacttcccatgattcagttatactgaatttctttggttctctaaagcacatgtgctttctgttctgcagaggcttttttgttcacttgctattctctacctgggaaactcccccagcccttcactgcctccttctaccatctttcaggcctctccttacacatcacttctttccaaaaatctgccttgacactccaggtctcggtttcctaggtgtaccctataactccacccctttcatagcatttctcactctggctggagatttaccttttaacttgtccatgtcccccactggagtggaagttcctggaggtcagggattatatcctattaattgttgtatttccagtgcctagagtagtcttgcatacatggatggtattcaataaatattggttgaatgaataaggagttctttcatttcatatgtaatagatcatggaaatagccttgtgattgatacacagcaggtattaccatcctcactttagaatgaggactcagagccttgagatgtctgagggccttgactgggacagctggcagatgcaggagcagagctgcatcacccctgtgggctatctcagggttgtctgtaatctaagtacaatgtctgttgattttggactgaaggctttttgggtaattgtttgctttttcaatacttataaaatagtttccatccttactcattgatagtaaggttagttattttagaaaacaagctaaatagcagaaatagtggccttttaagttgaaaatttaccctgaaaaatctacagagtagcaaacagagtatcaaaaggagttgactgtatctatttttataactgccacttatggattattcagtaaaaccacaattcacttttatgattttttttcatgtttctctgtcacaagagcaaactcttgctccataataacattccagaatacagcaatagcaaaagtcaacattttgaatcctttacaaactcttagacatttttttttttttagtttaacatgttacaaaacaaaatttcttcttttttcacagcagtttgggaagtacatactatttattagctcatcagcatgaagctggaaaattctttttcctaaagttctttatatctacaaactgttgatgttttcatttatttatttttaatgctacgttgtaatgaaaatcattggaaaactttagattctagtaattttgaagtcttcttagtttggacaggactgagctaaagtttgtactttttttaatttattgaaaaatggtttctaatgatagtattaacaagattatattgggggcaggacgcagtggctcacacttgtaatcctagcactttgggaggccgaggcggttggatcacctgaggtcaggagttcaagaccagcctggccaacatgtagaaatcccctctccactaaaatacaaaaattagctgggcatggtggcaggcactgtaatcccagctacttgggaggctgaggcaggagaattgtttgaacctgggagtcggaggttgcagtgagcccagatcgcaccactgcactccagcctgggcaatagagcaagattctgtctcaaaaaggaagaaagaaagattatattggggatatatatgtgtgtgtgtgtgtgtgtgtgtatatacacacacatatatatatacatatatacatatatatacatatttaaaggataaaggattctgctgccacagatcactaaatcagatgatctctagcaatttcctgtttgtttgttttttgcccatagtgcttatctctttgaacagtaattttccacttactatttttctccccttttggaccataatttcctttaaggcagagcctcctgttactcatctttgaatctggggtctgtcagagtacctagaatttaataaactctcattaagagccagttgaaagaatatatgactaagcagtcatttacatccaaaagatccgtaggagaattcttatcagcacatgtgattggtaacaataactttgtacttttcaaaaacaattactaatctatcttgctttccattatctcaccaaaacctattagcatgtctggcagaaaatagatacttaataaatttcttaaatgtttactgacttcaattttaagttttattaactatgttgacttttctctaatgaagatgattctaaaaagctttttactatacttcacagtgaataaaacagtgagataggaatattgcaaaatgtcccctgtgttggtcagtcttagtgtcattcattttaaaaattctgttctctaaatattgacagttatatataaatttatgtaattgtttacttctaataaagaatttcatctggggaaaaacatactttgctcagctctttgccacaagtgcaaagtctaagacagtcaaatagctttcctagtacggccttaggaacttagtatatgactggtgtgaatctagagggagcatactgcattctgaccaaaatctccaccctgttactatggccatcactaacttcgcagtattgcagtacttcctgctagcttagttcccaaggcaacttgtgaaggaaaatttttacaaagctgttgtcacacaaaggtagtgtttcagttcctgagcccatgtccttggagttgcccaggctccaataatactaataattactgtacattaggtacttaccatgtgccatattctgtgggagccgctttccacaaattatctctggtaatccttgtaacaaccctttgacatcaatattattattttctccatttttttacatatgagataaatgagacttaaaataatgtgcctgatatcatcagcaaatgagctgaggagggcagattcaaagctgattgtgtttgactctagagctgcagtcttaagccagaccttttcttgctggttaattttactgaaaaaaaaaaaaaaaaaaaaaaaccctcaaatactgctgattgatctaaagtactaacatttctatcagtgttagggaaattttaattttataatttgattttgtgagaaatttatagcatcttgaatactcacatgcaaagtgatatgtcttagataacattttacaatggcagagcttaagccagtgctcagtcattcattcatcctcaagttttgattcatttatcattcatcaaaactctgttttgtttggccacccacattctaggagctcagtacatatttgataaatgaatgaattgttgaggttgacagttacccaggactggcattaggaacacagagctgaagagcacgtttttaccctcaagaagcttacagtctaacgagggaacttgcacaaatactactatcactaggtgcctggttgaatggcttaagagatgatcagggatattcagaaggatatgtcaggctcagcaatggcatcacttgagagcatcaaggtgtttagggaactacaagatgtttggttctgctgggaataagagtgaagggggctccatttggatgcctcatacaccaggtgagagatcttagattttattccaccaggaggagaactaccataggatttaaaacagaaatgatatggtcaaacctacatcttaggaagatccctggggtgtttgtatggtggacttgcaatttgactaattgagatttgtaggatgattcttaagagatgatgatgacccagactgggatcactataatagagttggtaaggaggagaatgatttaaaaagtagttggaagaattctagggatggagataaacatttgaaaattattaacttataggtggtcatcaataccctgaaaatgactgggatctcagaggagagtctggagagttggaaatgacaaagactaatattcaagggggcaggaagagggagagttgttcacacatgacaataggaagaaatggccatagagtgtgtggtttctctcaagccaaggaatagatgttttaagaaaggaaaattcttgtggtgggaagcagtagagatgacagatacacattaatttcttgagatttctagatgactaaatgggcagatgttgaatgatagctaaaggagaacccagaaacaagggagggattttgtttttgttttttaaaaaagatagaccatagcagcttcatagactgaaacaataaaaaagttgaaggcacaaagaaagacacaggtcctctaactccctgcccagtgccctttattcatattctcagcacttgtatttctaagttttatgtttgagtcttcggggatacatcagagtagtcccccttgtctaataaatgtgtttacatttcctgccataccagaaacccttctcaaactttaatgaatttctacaaggtgagattactttaatgagaaaccaaccaaggaaaggagtatcatctgcaatatactttcaaatgttttttgcttgtttgtttcttgtccagctaaaaaaaaaaaaaaaaaacaagccattggtcctaacacaactttcatattctaccccaatatcaaagaggcttaaaatctcctggtcgtgtgatgggcacacagttaattttttgtgaacaaacacagtgttatgggccatttctgaatttatctctgaaatcataagattctttctgagccattatctcattctatattacagtcaggtggagcccatcttacctcctcatactaaattctagacttctcaagggcaggagacaatcatctgtatatctctttggccttcatacactcaggagtacttgccaaaaataaacatttaatgcacatttatttgaataattgataagatccaatacttcaataactttgtcatatttttatagaatgggtttctatatctcatttgcattttcaaactttacttttactgtctagctttaaaaaaaaagcctttgactctaatacagccctcatattctaccccaatatctaagaggctttatatctcctagtgttgtaccactattttaactccagtattttttacttcatagttttacctatttgttacagttagtttttatgaattcaagagatgaatagcaattttccatatgtaatttaaaaaaccccacagttgactattttatgctatcttttgtcctcagtcatgacagagtagaagatgggaggtagcaccaaggatgatgtcatacctccatcctttatgctacattctatcttctgtctacataagatgtcatactagagggcatatctgcaatgtatacatattatcttttccagcatgcattcagttgtgttggaataatttatgtacacctttataaacgctgagcctcacaagagccatgtgccacgtattgttttcttactactttttgggatacctggcacgtaatagacactcattgaaagtttcctaatgaatgaagtacaaagataaaacaagttatagactgattcttttgagctgtcaaggttgtaaatagacttttgctcaatcaattcaaatggtggcaggtagtgggggtagagggattggtatgaaaaacataagctttcagaactcctgtgtttatttttagaatgtcaactgcttgagtgtttttaactctgtggtatctgaactatcttctctaactgcaggttgggctcagatctgtgatagaacagtttcctgggaagcttgactttgtccttgtggatgggggctgtgtcctaagccatggccacaagcagttgatgtgcttggctagatctgttctcagtaaggcgaagatcttgctgcttgatgaacccagtgctcatttggatccagtgtgagtttcagatgttctgttacttaatagcacagtgggaacagaatcattatgcctgcttcatggtgacacatatttctattaggctgtcatgtctgcgtgtgggggtctcccccaagatatgaaataattgcccagtggaaatgagcataaatgcatatttccttgctaagagtcttgtgttttcttccgaagatagtttttagtttcatacaaactcttcccccttgtcaacacatgatgaagcttttaaatacatgggcctaatctgatccttatgatttgcctttgtatcccatttataccataagcatgtttatagccccaaataaagaagtactggtgattctacataatgaaaaatgtactcatttattaaagtttctttgaaatatttgtcctgtttatttatggatacttagagtctaccccatggttgaaaagctgattgtggctaacgctatatcaacattatgtgaaaagaacttaaagaaataagtaatttaaagagataatagaacaatagacatattatcaaggtaaatacagatcattactgttctgtgatattatgtgtggtattttctttcttttctagaacataccaaataattagaagaactctaaaacaagcatttgctgattgcacagtaattctctgtgaacacaggatagaagcaatgctggaatgccaacaatttttggtgagtctttataactttacttaagatctcattgcccttgtaattcttgataacaatctcacatgtgatagttcctgcaaattgcaacaatgtacaagttcttttcaaaaatatgtatcatacagccatccagctttactcaaaatagctgcacaagtttttcactttgatctgagccatgtggtgaggttgaaatatagtaaatctaaaatggcagcatattactaagttatgtttataaataggatatatatactttttgagccctttatttggggaccaagtcatacaaaatactctactgtttaagattttaaaaaaggtccctgtgattctttcaataactaaatgtcccatggatgtggtctgggacaggcctagttgtcttacagtctgatttatggtattaatgacaaagttgagaggcacatttcatttttctagccatgatttgggttcaggtagtacctttctcaaccaccttctcactgttcttaaaaaaactgtcacatggccaggcacagtggcttacatctgtaatcccaatactttgggaggctgaggtggggggattacttgaggccaggaattcaagaccagcccaggcaacatagtgaggccccatctgtctttattaaaacaaaacaaaactgtcacagcttctttcaagtgatgtttacaaattccctatggtttagtcacaaggaagttctgaggatgatgtatcacgtcatttctgttcaggcttttgagcctcctggaggtaaatggtttccttactgaaggcttgttattaccatgattatcactaagcttgaagtaacaaattaggggggcagactcacaacctcttgccctgccatggacaagttcaagaatctaagtaaagtcctctattgtctgatcttggatttgctcaacctgaacaagccaaggaggtgtattaaactcaggcacatcctgaccaatttggaattcttaagcttcagatcactgtggaagaggctcaactctttatggtgctgtagacttacgctcattttctaggtaatttataagggacctaatattttgttttcaaagcaacttcagttctactaaacctccctgaagaatcttccagctgctgagtagaaaatcacaactaatttcacagatggtagaacctccttagagcaaaaggacacagcagttaaatgtgacatacctgattgttcaaaatgcaaggctctggacattgcattctttgacttttattttcctttgagcctgtgccagtttctgtccctgctctggtctgacctgccttctgtcccagatctcactaacagccatttccctaggtcatagaagagaacaaagtgcggcagtacgattccatccagaaactgctgaacgagaggagcctcttccggcaagccatcagcccctccgacagggtgaagctctttccccaccggaactcaagcaagtgcaagtctaagccccagattgctgctctgaaagaggagacagaagaagaggtgcaagatacaaggctttagagagcagcataaatgttgacatgggacatttgctcatggaattggagctcgtgggacagtcacctcatggaattggagctcgtggaacagttacctctgcctcagaaaacaaggatgaattaagtttttttttaaaaaagaaacatttggtaaggggaattgaggacactgatatgggtcttgataaatggcttcctggcaatagtcaaattgtgtgaaaggtacttcaaatccttgaagatttaccacttgtgttttgcaagccagattttcctgaaaacccttgccatgtgctagtaattggaaaggcagctctaaatgtcaatcagcctagttgatcagcttattgtctagtgaaactcgttaatttgtagtgttggagaagaactgaaatcatacttcttagggttatgattaagtaatgataactggaaacttcagcggtttatataagcttgtattcctttttctctcctctccccatgatgtttagaaacacaactatattgtttgctaagcattccaactatctcatttccaagcaagtattagaataccacaggaaccacaagactgcacatcaaaatatgccccattcaacatctagtgagcagtcaggaaagagaacttccagatcctggaaatcagggttagtattgtccaggtctaccaaaaatctcaatatttcagataatcacaatacatcccttacctgggaaagggctgttataatctttcacaggggacaggatggttcccttgatgaagaagttgatatgccttttcccaactccagaaagtgacaagctcacagacctttgaactagagtttagctggaaaagtatgttagtgcaaattgtcacaggacagcccttctttccacagaagctccaggtagagggtgtgtaagtagataggccatgggcactgtgggtagacacacatgaagtccaagcatttagatgtataggttgatggtggtatgttttcaggctagatgtatgtacttcatgctgtctacactaagagagaatgagagacacactgaagaagcaccaatcatgaattagttttatatgcttctgttttataattttgtgaagcaaaattttttctctaggaaatatttattttaataatgtttcaaacatatataacaatgctgtattttaaaagaatgattatgaattacatttgtataaaataatttttatatttgaaatattgactttttatggcactagtatttctatgaaatattatgttaaaactgggacaggggagaacctagggtgatattaaccaggggccatgaatcaccttttggtctggagggaagccttggggctgatgcagttgttgcccacagctgtatgattcccagccagcacagcctcttagatgcagttctgaagaagatggtaccaccagtctgactgtttccatcaagggtacactgccttctcaactccaaactgactcttaagaagactgcattatatttattactgtaagaaaatatcacttgtcaataaaatccatacatttgtgtgaaactttgttgttttcagatgcgttcacttgtcatgtttcatcagtctctcactccaatttctaagcttcatggaacatgaaacacgaatctgtcttttagatatagcctcttttgagaattcacatgaattagaacacacatttttagttatctgtttaaactatggtaaaatatacataacataaaattttccattttaaccattttaaagttcagttcagtgtcattaggtacattcacatggttgtgcaaatatcaccatcatccttccacagaatttttttcttgcaaaactgaaactctttttacccgttagtcaataatcccgcatttatctttcctctaatgcctggcaaccaccattttactttctgtctctgattttgactactcgaaggacctaggagtgggatcatacagtatttgtatttttgtgcttatttcatctagcataatgtcttcaagcctcatccatgttgcaacatgggtcaattttcttccttcttaaggttgaataatattcattatagagtagtccccccttatccttggggaatatgttccaagacccccaatggatgcctgaaatcactgatagcactgaacctgattactgtgtttattcctatacatacacacatacatatgataacatttaatttataaattaagcacagtaatagattaacaacaataatcataaaatagaacaattataacaatatattatgacacgagcgatacaaatgtggtctctctctttctcaaaatatctcattatactgtgccacaggtaactgaaaccacagagagcaaaaccttggatagggggaccactctataaatatgtaccacatttttcctcacccattcatccatcactggctacttggtttgcttccactttttggatatagtgaataatgcttctataaatatgggtgtacaaatgtttcttcatgtccctgctttcattacttaggatatgtttgaagttatttttatttttaaatggaggcttatagaacacaaaagatttatattctgcaagtgtccatctatttcttttaaagcttattcaaaaagtggtagctatctcatagctcttggtaagttaaaaatcttcatcaacgaaaatactatttctgcgttggcacctgcatggattttctttgtccaaatccctctttttaattgatgaggcttctttagttcctttttttcttccttgttgagcttcttcatgaaatgtgcagttgctagcatgtggtggacggactgcagatccctactgaatgccaggccctccggccctgtgttctctttcttggagaggtttgttttcacacgtaaccccaagagggcagtctcagagcgtgttctagtctagttctttttttaaaattactaaactttattttttttagggcagttttaggttcccatcaaaattgaacaaaaagtatggagagttcacatataacttctccatacatgatagcctcccccattcaacatcccacactaaagtagtacatttgttacaactgtgaaagcaaatagaatttcaagaccccaagctcactatgccaaagggcaagttaagcttcagagctgaattactcaatattgccttccttttgttccctaacagccgtaacttcacaatcttgtgtgatagcctcatccataaaccaggttcccacaatgatagaaggccacatatctccccaaatgacctccctcacaattgtgcccaaggaaaatccttgtgagaccctatcttttaggatacatatccctcctataaaatagccctaaaactgagttatgttgaatttcaccctgatgatgtcaattaccagcttgtcttcataggcacaggacgcgggcaagaccagaaatcatcgtgctgtctaccctgcaatgaacacataattgacttttcctttactccctctttttacctataaaatttggatttactgaacactaaccaaagcctcccctgaatagaaccatttgcctcactgcctaccctctatcctcttttccttctccgtgtttgcactttactctttaaatattaaagttcccaaaccctctttggaaaagcacaggtcacagatgctcctctggcttgtgttcttcctgggtgcatctgcaaactttggctaaacaaacctctatcgattaagacacctgcctcagtcactttttccttaacacaaccaatgaacctacattgacacattattattgcccaaacacaatagtttatattagggttcattattggtattttacatttcatgggtttggacaaatgtgtaatgacaagttaactaccattacagtatcttacagggtagtttcactgcccaaaaaatactttgtgctctgcatattcattcccctttctcccctaacttttggcaaccactgacctttttattgtctccatagttttgcctttaccagaatgtcatctacttagaattacgcagtatgtggccttttcagattggcttctttcacttagtaatatgcatttaagtttcctccgtatcttttcatggcttgatagctcatttctttttagtgctgaattatattctattgtcagatgtaccacagtttattcattgacctactaaaggacatcttggttgcttcaacgttttggcaattttcaataaagctgctgaaacatctgtgtgtgggtttttgtgtaaatataagttttaatttctttgggtaagtaccaaggagttcaattgttggatcatatagtaaaagatgtttcgttttgtaagaaactgccaaactgtcttcaaagtggctgtaccattttgcagtcccaccagtaacgaatgggagttgtggttgctccttatcattgccagcatttggtgtcctcggcgttttagaatttggccattctaatagttttgtggtggtatctcattgttatttcaatttgcatttccctgatgacatgatgtggagtatgttttcatatgcttatttgccagctgtgtatcttttttggcaaggcatctgttaaggtctttggcccgtgttttgatcaggttgtgtcttgttgttgagttcctttactggatttcttttgttagcatggtataactttatccatccctttattaatctacctggggctttaaatttaactaggtttcttatagacatcatgtaagtcttgctttttgattcactctcacaatctttgttttttagctcttgacatttaaaatgattattgatataattggattaatatctaccatatttattcctgttttctgtttgtttcctttgttctttattcctatttttactttccccatttttttgcctttttaaattttattgagcattttacaggattctattttctcaccttcttaacatagcaattcttctttttttaaacttttttagtggttgccctacagtttgcaataaacatttacaagtgacctatgtgcctttaaataacaatattccatttcatatcagtgcaagtaccttaaattacaaatttctagcttctgtcccttttaccatttcaggtattcatttcatttatatattagcttatatatatccctacacttgatttttcctcatatgagattttctttcctctttcccatttaaaaaaataaaataaactattatagccacagactttctatttttatttgttttctgtattgaagtcttgattttggggctttacttgtccctgtctatgcccactcctatctgacacacactttcttaatttatttcctagttgtttcactttgtttatcttcattatgaggaaaaaaagccaaaacctgaaatgaatatgcttccttccagtaaccagggaccttccatggttgggaaattgttacctattcgagtgaaaggctaataaaacccccaaggtaaatattttagtacttcactaaagaaagaacctcaaatactatgtggaagacaatttaaaatgaggtttaaagagctcaatataaaaacctgtttgacctgttaaaacaggtgtggacaatcacaattccctatttaaaaatacagtgaaaaaacctacaaatgcaagacaaatacattggagcatgagaactccaaattgttaggttaggaattagaagctgttcccagtgtgtagagctaagagacccaagtcattgtcagttgacagggagccgggactcaatacctgtgtactttctcagagaaaggagaggtcttggcaaaattttgggtttatccttaattccatacaatgggaatattcaattgctctttaatcactcagtattgatagggacagggggcagagaaattctaggcagaaaagggcgggaccctggtgaaaccccaccctcaatccgaaaaacctgaaactgccaccgaaagtgagaacttctatccctgttttcccactcgaatgttgcctttttctaaactacccgtggcctgctccacccccatcctttgcctataaaaaccccagactcagttggtagatgggactataactggacattggagagaagtggcttgacttcagagcgacagcttgacagcatactttggagaagaatctgagaggagaaggcaagacttcaggggaagattacctatctgccctgtcccctgttcagctctatttcccactgaaagccactttcatcagcaataaaatccctcatttaccatccttcaattcgttcatgtgacctcattttttctggacgccagacaagagcttggaggccacgagtatggatacaaaaggctgtcacactggctgtttgcccttgctggtggagggcagctgcctcacatgaaaaggcaaagagctcactgagctgttaacacttaagccttccgcagacggcagagctgaaagagcactgcaacacaccctctgggcctcaggctctcaggcactcctacctggttgcgccgctgggcccgcacagagtttgctactgccggcacctgaaagcggttggctggttcctgcactcgctcgttctggttcctgcacttattcattcgcacgctccctcccacaaggggtagacggggcgggatgggtaaatgaggcacccctgtctcaagtcccgtgaaggcgtcagggaaataatctgcttcagtttctctagttgtaaaatggttaagaacattatgaaaggtggtcaacaactttataagtgaatatgctaatgctggccttaattctaaaatgctacttggatcaaaagttatgattcagttccaatacatcttctattcattgaagtacagaatctgtacacaaagtacaattgtatcttcaaaaactgccaccttgtggagatttggttttattgttaagacagccagtgccaacaacagaaatgagtacagagcctcacatactaatgtaagtgaatctcaaagacattttatctttaagccattttgaaaagtagaaattaagcctgaatagttttggggcacaaattgctctttaactctcttctttcccattcacctttgtcactgatggaataatagaaggagcaatctttatcagcaatggcagatgtgctgataaatgaaaccaaaactgaattgacaaatattgacacaaatacttatagaagcaatttaaaaatctaccttgcaattaatccttatgaaatttaagtcataatttactaaaaattataatataaagaaataaactttctctgttttattaaaagaaaggatcaatacatttggccacaattgattggccataatttttgtcaatgttctataagctaattgaaaataagactattttaaatataattatctcccttctcctttgccttttcattggcagcaggtgccatgggcttattcatattctaaaagagaagttgtgtgagcaaatttgtcatcataggcaatcctcttgtaaggaaaaaattatgatttgatttttattttctcttatctcctaattgggtcagatactccagtgtcctcggggagccaaaccaggagccagtgtgtccttacacaaacacagcttccttcctgcttggagctcacaccaagcatttgcatttgaaccaagcaatgttgacaggctattgagccacagaagttaaacattccaagtgagcctgagacgaccattacattcttttacattttctggtcgattaaaattttaattgtttaaaatttcaaatagatacaaaaatagacatagagtataataaacttcacacccctgtcactgaacttcaatagttatcagctcacagtcaatcttatttcatctatgctccctcatgcttccctcctatattattttgtgcaaatccaaacagcatataactttagctctatgtgtctctaaaagacacggctttctctatcattctttttcttttgaaactgatccatattacctttaccagaactagaaaaacagtcatctttaatatcctcaaatattcactccatgtataaacgtcattgtcagttttttcccaaatataggtagtcctcatgttgcacattaatatggcactatgaaaatcaccatgcaagataatttaaataattaatgggggaaaaattgttccatgacctttaaaaatattaaaaatttaaaactttcttactgttggttataaacaatagggacacaaaaatagtgaaacatttagtaagtaatttaaaacattagaaacactgagaattaaaatgtttcttttaaactacttatcaagagtagtttgagcaatacttggtttcttttggttatgtaacttgcaatatgaagaaagcatcttttctatgcctgggcaagttgtcatactcctttctaatttaggaccagcttccaacattgtatccttcgtgacttcaatgttgtaaaatatctccaagagtttgtttaaggtaatgatttttgctgatgtcacctcctctggggcatctgacaggcattcctgctaggtcaacctatagcagagggtggaagggcccagagatggcaagagagaaaaggggggaaccttttagaggtgattaggctatgagggctctgctttcatgaatggattaatgccattacggcagtgagttcattataaaaggacaagtttggcccccttctctctctttcttgctctcttttggcccttttgccttctgccatgggatgacacagcacaaaaaccctcaccagatgctgaccccttgatactggacttcccagcctccagaactgtaagccaacaaatgtgtgttctttataaattaccccagctgtggcattctgttatagcagtacaaaatagatcaagacaaagggggattgcaggcaggaagggagcccctgacctcttagtttcactcatctggaatttagccactacaacacagagctggggcttgaggggataagaaatgctattgacctgcacttcccagggtgatagtacagttacaggctgtaaactcaagggagagggaatgccatcatcttggccacatcagcctggagtagagcttctatcacaccaagttgggggagggaagagggagcagcttgtgactgaagtgccataaacttttgttcttactgagattagtatattttctggaataaacgctgctgcttttgctgtatgtgcttagggccattttcagagactttaaatgattgataattgttaccagtaatggttattttgatgggtagttggtccacagagctcctcaccttgctgttctagaaattgtcttttagcttagtattaattcctgaatttttcagtttttctgatcttttacctccaggatgactctttgaaacaactctaaattattgactgaaacttttatgtataattctcattttgttcttcacacaatctctgtgaaggaggttctaagaactaagaggcttagagagggtaaggatcttcccagaaattacacagcactcccagatttggaacctttagaaagtttatatacttattggaaaacttagctcatttttaatcagagggaagtcattttacagtgccccatacagggagtcagataactacttcctagttaggttttcctctctatagagagtcaaccagccctgctgtactttcccgtgggatctgaaactgcagaaatctactgagaaaaacagaatgctcacagcaggataaagctcatgttttctagagctactaagattcaggcttatgcctctgtgtttgattttttaatagtcttgctaatgtcaaagtgattctatcttacacaccccaaagtctgtaaaggtataataacaaggggtgagattgtcttaaatctgcagtttcttgatctgtttagtgggctactataggttactgcaggacctctcaaggtttctagtatgcaaaggtgcattttgactctgtaagagtggaatatcatatgtaatgtttctcaattgatttgtctacataaccgtattttcttgtgccatttatatcctgtgttttggggaaggttggcctagaacatttattctaaaaggaaagggcatgggaaattcttaccattggcagtgtcggggaggaaaaaatgcatacttcttacccatttagtttattttgctagtttacaaattaaattgagataagacagattaataggagaaaatcaactttaattatgtgtgtatacatgggagtcccacaaaaatgtaagactcaaggaagcagccagatgattgagacctatatattatcctgagctacagaaagggataagggtttggggcttttgcggggttgtggaggcaaattttgggaaggcgaggagaggaaatgtatgatcaataaatgttgccttgttgtgcagataaaagtgtcttaggtgataaagatgtttccaaagagtagttctcttcatggtacagatattttactcatgatcatttcctttatagatataaatttcctttacgaaagggggaattttattttatgtagttagtggagaagtcggtaaagagcttttcctgtattggctgattctcagttttttttagctcaaaatgatcaatatgccgaagtggcatgttctgaaatgacatattctgaatcctttcagctggaatatatttgtatatcaacagtgtttccatctgtcagcccttagggtctgcttatggaagatataagcacctggatgaccatgacgaaaatctggagattttgagaaaacactggtgcaaggctccatccaaaatcaattaaagaagaatcttggaagatggggttaggtcactgatagcttgaaaggcatcccaggtgattctaatacgcagccagttgagaagcacggatttttttattgggtttttcaggctggctgaaagaactgcgatgctcaggaaaccaggggtgcctggcaggagtttgaccggggagactgaagcctgtcaacagggacaagaacggtaggctggtgcctggcacctgagggtacttcagaggtgctcattaaaaaagaggaggggacatcaagcgagaattcttaatcagacattcaacaaattgagggtcgtctatgtgttctaggtgctaagaactcggcagcaaacaaggcaaagttctcagtgtcatggagtttacattctagtggatgaggacaaaagtaagtaaatgttaaaaatatatagcagatggtaactaaagagacaaagcagagaattaggttatttgctgtaacatcatcaaaaagtcattagtatggtggcaattgagcagaaacatgaaggaagtgaggaagtcagctgtgtgggtgtcttgaacagtgtttgaagcaaagggaagagcaaatgtaaaggcagaatcatggctgggatgttggaggagcagcaaggaagtgctgtgaatcttggggaaaaagaggtttagatgatatgggcctctgtaagagccctggcttttactttaagtcataagggaaaacttcggagttttgagtgaagagtgatgtgattggaggcacattatagcagggtgactctgatgctgtactgacaccagactgaaaagtgtagagcatggaagcagggagaccagttaggagtctattgtaatagtcctggtgagagaccacagcggcttggactaagatggcaactaaggtatatctgagaggtggtcagactctgcatttatcttgggaacagaagcatccagatttgctgatgaattgtatatactgtaggagaaggagaggactcaaggatgatgtgaaagatttcagtctgaggagttttaaggatgagactgggaagaatgaaggagaagttggtgggatgggaaggatttagggcattttagacattaagtttgagacatcttggtggaatgacaagcaagcagttgaatctgagtctgaagttcaggaaaaagattcagagtggagacagaattataaaagttatcaaaatggagattgtatttaacacgagtgtgaactagattcttgttacttgcaccatcaacatcacctgggagcttgttagaactgaagactctcagaccctacctcggaactgctgagtcagtatcaggatattgtcacgatcccaggtgatctgtaggtactttagagtttgaggattcctagattagatcatctagggtatgaatgaatgtagaagagaaagactgagaacctgagacaatctatctctggaggccttggaaaagagctggagactgagatgatataggaaaggggaatttagagagaatagtgttcaaatccaagttaagaatgtgtttcaagaaagagggagttaaatgcgtaggtcaattaaaatgaggaatgctagtttaccactggatatagaaatatgaatgtcatttgttacttctataagagcattttaataggattcaagatattgggaagagaaatgttagagactgaggatagaccttcatgagttttttctaaaggaaaggagagaaaggggaggtaagtggatgggaaactcaaggcaggtaaaagttctgggcacggtggctcatgtctataatcctagcactttgggaggcttgggagaattgctagcacccaggaatttgagaccccatttctacaaactgaaaaaaaaattagccaggcatgatggcatgtgcctgtggtcccagctactcaggaggctgtggtgggaggattgcttaagccccggtggttgaggttgcagcaagctctgatcacgacactgcactccagcctgggaaatggagtgagaccccatctcaaaacacaaaaaaggtgagagaagtaacatcctactggcatagtggatatatagataacaaattaaggggtggggcatttggtggagctgggggtatgtggaggccaaagcaactctgtcttggaggctaattcacaattttgacttctgattaaccccttttctgggaatgcctctaagatttctattttatctactgttccttgtgtaagagcatgtacttaccataaatcctgcccttaatcaattgttctatacatcccttctgaagcacatatatatcctttccctatggtgtataagcccggggtatggaaagtaagagtgtggagatccagcatcttgtctcactgccactgagatacagacatggcttctgtttttaagtctctattaaatgtttctttccaagaaactggatacatcagcctcttccttcagcttcagcttctaagtttgggtatatccgcccacagcagaacaggggagaattgagagtcattccaggataccctgaatagttgagagggaaggaacgcttggaacaagagaagggatcacctttagtaaggaggatggaaagtcactcctagaagtaggagaaaaggtagcttggtagatgtggggatagaaaattgtaagttttctttcaattgactcagttgttatcaatgtaaagggaagaatgtcattaattaagaatgaggatgggaaagaagctactggagatttaaggggaataacatatgaactgtcacttaagacagttcccccaacgttttaaagccatggcacacataaaaaatgagaatatttgagtgacaactaggaggggatttggatccctggccaagtttactggggcaggaggcaaatggctcaggggttctggttgccatttgcccagatggctaaagaaagtaatatcttctggcatcctggttctgtttgacacatgaattggggagctctgaaagaagagatgggaatgaataaagcagacaggcagaaaggtagtcagatagcaggaaataccttatgtgagtgaaattcatgaatttgaagaggagctggtgaggatggtcatatttttaaccacttcagctacacaggtatagtaatgcaatagggggagaactggatttaactaagtttggggttatgcctagcaagtatgacagagaggggatgagggagttgaggagagatgccaagtgtagactaattatgatcatgtaatataaactaggtgagaagagatattaggacatggaataggaggggaatattggaaaggtagtttggattctgaattttgtggggtttcactgtttttggagataagagagagaaggagatgactggagaatagaatgcttgcaattgatcactgatgagatgcaggtgatggtaatgacaaagtcagggtgttatatgggagtgggaagtggaggcaccgtggaggagaagaggctgttggactgagaggtcatggtattggaggagttatttacattgatattaaaatctctaagagtgatggcaggagggtgacagtgaacctggaggtaaaattcaacaattcatttgcttcattgaacaaatgaagcaaatttagtagcaaattttgttgtataaccccaacaaattgacatgactatgaaaagaagggccagtgtagtctggtggtagagtctgaggtcagaacttcagaaaggggcatttgtcggggagggagatacaatgtgtggaagtgacaataaggagcaaggaggccatcatcctctacctccatgtctggttatcaaagatattgggggaggaaagcagcctgcttgagaaggcctctggaaaaactgtgttccccaaagggagccaggttttcattaggaccatgtggtgaaagaactgtttaaagatgcaggaagttttgctgagaaggttgtgactctggagggcacaaggagatagtttggggaaattgagaaggtttgagagatgagagcccattgtgggatgtgtgaggtactaaggagatgagagctcaagtgccaaggtctggcttgaagaggcaggcttcttgttatgaaaactgctgctttatggatactggagagcaaacaactccagatagcttcagtgttttctacccaagcaactacaggttatctaacatcacttttcagagatcatgtttcttctggagacagaaaataatttccccataatccagctgagaaaattgcttggccttcccttaacccttccttgaaactttccgtaaaattatcgattccagaaatgagaaatgaaagagaatcttgtttttgtttgtttattctgttttgttttgttttgagatggattctagctctgttgcccaggctggagtgcagtggtatgatctcggctcactgtaacctccgcctcctgggttcaagcaattctcctgcctcagcctcccgagtagctggtattacaggtgtacaccactacgcccaggtaattttgtgtttttagtagagacagggtttcgccatgttggccaggctggtcttgaagtcctgacctcatgatccacctgcctcagcctcccaaagttctgggtttacaagcgtgagccacagtgcctggccaagaatcttatcttaatcctctgtcttaagacaatttatcctggaaaaatgattatccattttcttcaagtctctctccataaaacctctttatggaatctccttttgatttgaactttgatccaaatcataaacaatcctcattccctcttaatgttatgtatcacggatgtgagactgggtgtataccggtgtatatgtgggggaacagtggtgtcctgaatgccctttagacctgatctttatgaatcaccatgatatttctatttcctatgacctgtgtgatttttggttgttacttatcttgacaaatattcttttcaaaaacattgcgcactgaaggacatctggaaaattccaggagtctgtctaggttctaattgagatgcaatttcctaccttcatagccttttattgggcaatgtttgttgacacttgttttccaagttactggattactcatttcagagttcagttacccagaaaccacctacttctatgcctacaataagaagcaaacaagaggtttttgcaataaagacaatcagtatctaggataagggctggcatgtgggctggtcccatctttgctgtgaagctacggggaggaggtagggaggggagagtctggctttctcagtttgttgagtaaccccagcgggacatcctgcctcacatcctggcagttgaattagctgggcttttcaaggtcacaagaaggaatcctatacccatcacctgcaatgataggagtttattgttcaaatagtaggtaggaggggaaggatgggaaacttcctcatcactgttcaattccccctggtcccagggcttcagagctggaataacacacaacagacttcttacctccaatcaaagggcaggcaggtaatttgtcttctttttgtttccctcacacaatggagagtgcacaattgggtcggcttttgatctctcactataatgctctacaactggacatggttaccaagtcgcttctgtgatggtcagcttttccagcattaggagttttaactgaggcttcagggattcataccctgcccctcgccctgggattttgtgccagaatgagggtctgagcatgtgtgcatttttttgcgaaaggatatgatcctgtttataaaggggcctcaatctttgcttcaattcactgtggctagcgtaacagatttatgttttactcatagctcgtgacaatgcaggcagggatgagcccatttgaatcaccatcctcaaaaagaatccatatgctggcagcgagtgactcctcctgcagctggtcatgtatcagagtgttgtgtgaggtaatcccctcacttcctcacactgatttctgatacctctggtccttccacaagtcacagaaatgcccccatcttctggctgtgtacacgtgctcatacaccacccctgcctccatgacagaatgtagaaaagttttcttgtgtggttctatagccaaataagtccctttcatgctattcaaatagggtttcatagtgctgcactcagttctatttttcttttaaaatgatcaaggttgactaaatgaaaggcatttcaggatttttagttcctagaaagcagatggtttatatatcaatctcctactctttagtagcaaagattctacaactgcacatacaaacttcaagaattccaggcaatcctaaaggttttcctgggccaagcctctgtgcagaggtatgtttttaaccatctccaatgggattttcagtattttcagcattgactcaactccagtcaacagcgatatcaaaacaagtgaacatcaagtctgaaaagaaagtctgaatactgttatccaatcacaaaaaagacgggtgatgtgaatgtgtgttgctctttaaagttggttattttaagtcaaatccactcacctttcaatataatcagtaaccttcatagcttggggctgcctgggcttcagacagcagagttagagaaaacagaacagtgatttgtgtgtttggctttggagcaatgcaatatgcagttcaaattcaacctcatttcattaactctgtaactgaagtacctgatagcaactaccaaaactaacatgtagaaaataaactttatttcacccaagagttcagttcactgacatcgaaaggcttcagagatttggatcacatgaatataacatgagagctttacaatttttaaaaacaagtatgtttagaatagggatgaacactattctgtcagcatcaagaatcatttctaattcttgtagactcttttccatgataagatcaatgtaatttgtaacaaattacccttgggttgagtccttggagaaagctggactcatttttaaaaagagaatgaaaattaatttcaatcaaaggcacttaaggcttttatttatactttgcatttgttttagggaatttttgtacgtttatcaatagtcctttattacaatattttatcctttgaggttaaaaaaacaaaacaaaaaacaaaacaaaacaaaaaaacctggctgggcatggtggctcacgtctgtaatcccagcactttgggaggccaaggcaggcagatctcttgaggccaggagttcaagacctgcctggccaacgtggtgaaaccccatctctactaaaaatacaaaacattagctaggtgtggtggtgttcgcctataatcccagctactcggaggctgaggcaggagaactgcttgaacctaggaaacggaggttgcagtgagctgagatcatgccactgcactccagcctgggcaacagagccagactctgtcttaaaaaaggcaaaaaagctaatattcagtaatacgtgcttaatacaaaccttaaagttcccatataaacctggaatcaattctaggaaagacacataaaatatggtgattatattttatttcactctgctgtgggaagaggctgggataatgtttaaattaaaacaaaagtgacaatacccctatgaaggagaccaggtcaacataaccggctggcatcatgtttatcttctcagcatttaaaacacacacacacacacacacacacacacacacacacacacacacacacacaaactttttggctctacttctgaccttggcttttatattggtgttcatttgtttttcagaggggcttggttcttttatttgaagatacatcctatttgttggaagaacttccattaaattatcttgtcagttctcactaaattttcttttcacagctcttgctgtctgggttataaaaacccatggcaaacatgggaggccccaaaggaatgtgtgctgggatcctcttgaaatattattgccctggatcctttgagctctttgagtccagaaagcagcatggagaaggagggcaaacctgcatagtttctcagaatggatgagtttttcttcagagtagccatgtagagcagctcaggaaatgactgctcttaagctgacaggctggcagaatattaataaatgcaaaataagcaactgtcctgcaagtatttcttggatgctgtttatacttgatttctatccaatgctctttagcacatcttctcagagtctagaaagttgtctcctttttccctcaagccaaatgggttactgctttcaagctatttttgctatgaagacaacaataacaaaacagctatgccaaactacttcttattttcaaaaccagtttgatttcctctgacaaaccatcaggccagtgtgactttgcatcactggattaggttagtgtaggtgctgtggtttgaatgtgttccctaaagcttattggaaacttaatccccactgcaacagcactgagaagtgggagctttaacagctgagctgattaggtcttgagggctccattccttgttactgggttaatgtcattataatgggagtaagttaatcagccagggagtgagttcctgataaaaagatgagttccccaattcccctcttctcttctgcaacagacatgctctcttgaccttctgccttctcccatgggatgactcagcaagaagacccttgttaaatgtgtgcccctcagccttggacttagcctgcagaactgtaagaaataaatttctgttctttacaaattacccactctcaggtattttgcttatttatagcagcacaaaatggactaagacagagtgtaactagatgtatgaggaaatgacctctctctacataggctgtctatctttggagtacagctccaggtggacagtggcattgtttaggcttgctaggaggacagctaggagtgaattaaaaaaatccattttgcttctaaaactaaaagggtcattttaattaaaataataccataaacataatttatattaaaaacaaagtcatatacaaattagagaaaaatacaaagaaatgccatttcctaggtttgattcgggcatcttcatttctaaaattaactattcctgagttctgctaatgtgtcctgccacaagtgtaggcataaaaaggtgaaggaattaaactaccaggctctgaatcaagggacttgtttaatagaattatgtataatgaagaatcctactcgctttgaattcaacgtggaagttattcctcccaccaaaagaagcagagagggaaggaacctcccagaaaagtccaggcagaacttacaagtttgagccatatgaaacaggtaatatttgaccatttttgctgaagaaacatatcaattccatattgattgacacaatagaatcatcaacttctataatgggagctgtggccttttccactttttcctttctcctatatttgagcagaaattcccagaagggagtaaaacttgctctacctatagaataggcaagaaattgttttctcttcctccatccttctgcaatatcaaaaaatatctttaagtattcaagagacgtgaacattattcctattctctcctgggattcagccatccagccttctttaccccagtgggcctcaaagttctctctctctctttttttttttttttttttttttgagacagggtctccatcatccaggctggaatgcagtggtgcaatcactgcaggctcaacttcccgggcttaggttattctcccacctcagcctcctgagtagctaggaccacaggtatgtgctgccacactaggctttttttttttttttttttttttgcatttttagtagagatggggttttgccatgttgtccaggctggtctcaaactcctggactcaagggatctacctgccttggcctcgaaaagtgctgggattacaggtgtgagccaccacgctcagcccttaaagttctctcttaattaatcctcctaagtttgctggggcagagggagggtggggcggatatgggagtactttatatgtataaaattttgccatagggtaggttttaattctcagttcttatgttttcataatttcttggagtaaagaactccttcaggtattgttcatgatatatatctataacctcaactgactatctcaattaagattttggtacacaatgagtgtaggccacataatcctcatcccttacggaatgctgtttagtgagtgttatacctgtctaggcatgtttcttgttacacttatgtaagttttaactttcttgaaggctgtctcagaatatattcctatggctcaatgccttttatgttcttggcttcccgtcaatagaggccatagcaatgtgtgcttgctcacctcatctgctgttcaactgagcacacattacctggcatggggaaataacttcaaatttcttcagacaaaggtccaacaggccagacaagctcatggctagttccttgacctgaacaatcttgttatttacagaatctccaacattcaaaatggaggaacttccagctcatgattaaactctttagcattctttcaacattggcaccattatatatttcgattaacagcattttaaaaagagatagtgtattagcttcctgggctgttgtgacaagggaccacaatctagatagattaaaaagcagttattctctcacagttttgaaagttctggaagtctgaaatcaagatattagcaaggccatgctctctctgaaggctctagtgggggattatttcctgcttcttagcttctggtggttgctggtaatctttggtgttccttggcttgtaaatgtatcctttgaatctctgcctccatcacatggcactctccttctgtgtggctgaatttctctcttattatccttaaggataccttcatccattgtggcctcatgttgatacgattaaatttgcaaagaccctatttccaagtaaggccatattcacaagtttggatagacatgaatttggggcatactattcacctccgtgcaagtagtcttgaagatttgcttctaaatataataaatccatttaaataaaactaaatgtgattcaaataaatacttatacataaataatcaccactatgtcccaagctccatcagctccatgtttatatttattcatttgttaatttaacaaatacagattaaaagtctatcatgtgttctgagcagtactggggccaaaataatgaaccagagggacaaggtccctgtttacgggatgtttatgttctagctgggagagtgataaacaagtataatttcatttgtgctctcaaagcaatattgagaactgaccaagtgacagtcactgagaatgaaaaagtgaaaagagtaaagtccatgtcttcatagaacttacattctattggtagggagataatgcataaatgagtagataagtacacaaacaaataacattagctagtgataagtgctatcaggaattaagaggcagggcaaatggttgcagggtcagagagctttgtgtcttttcatctgagccctgaaggaagccagggaatgagtcttgtgaatgtttgggtttagtgttctggtgggaggaactgcagatacaaagaccttgaagagagcaagttcctggtgtatttgggaagaacaggaggccagtgaggcctcttgatgtgaatcaggacagagaaagggattgagtggtagcctggggctcaaacatcctggtaaaccatgacaagagctgttactccaagtactatgggaaagcaagcagagggttttgagcaggagagcaacatgaatgtacttgaattttaaagggagaccctctggcgacggtgtgagtactggactgtaggggacaatgggtggagaaggggtcacgcttgggtgggattttgactacagagcctgtggtattcagagagtggaaagtgctatgaagtagacatggcatgatggagaggggggtaggaaggaaggtcattcattgggtagctagcatgtagagaggcttcaccgagaagacgatgttttcgctcatatgtgaatgactagaaatcgccagccttgtgaagatcttggaagatattttcaagtagaagcaaaaattggaaaaagaaaattggaaagctctagctgtggtgtgttggagaaaagaaaggaggacagttgaaacctagtaagccagaagatgccctgtaggagacaaaggaaaacagggaggcagggcagtgtcaggaaggcccctgtggtccttcctggtactgtgaacttcctgagagtactagaagaaagagtctctgtccatagcttgctggcgcctgctattttgtatggtataacattacccaatgtgagaggaggaagtgatgaacgttctaaggtgcatagagttagaggatgtctctctacaaattttacaggtcacaatttaaaaatgtcgatggccttacacatagcaaaataatttctaggaatttatcctacagaaacaaaattacagatacttaaatttagagcataaatattttactgtggccttgactacaatagcaaaagtaaccaaaaataaccagaaacacctggaaacagtccattgttaagaaaacagatgaataatttatggtgtatgtataagtggacatgtatttagctattaaaataatgtgtgggagctatatttgttgttgacttagaaaaatgtccacaatttatatttcaaatggtaaattgacctacataaataatatgtaaataaagtataatacacaaaatataaaattatttttaaaaactcaccatggtggctgggtgcagtggctctcgcctataatcccagcacattgggaggcaggcagatcatttgaggtcaggagttcgagagcagtctggccaacatggtgaaaccctgtctctactaaaaatgcaaaaattatccgggcgtggtggcgcaggcctgtagtcccacctacttgggaagctgaggcaggagaatcctttgaacccgggagggcggagcttgcagtaaactgagatcttgctactgcactccagcctgggagacagagcgagactccgtctccaacaaaacaaaacaaagcaaaacaaaaaaacaacaaaaacacccaccgtgaggtgatggaagtgttttaaatcttatttttgctggtagtttcacaggtgtacacaactgtcaaaacacgtggaattatactttaaggaaaggcagttccttgaacatagtttctcaaagttgaacaaatgttctgtatcttaaaaagtgtctgtcttctatcattttggtgtgtacctacatttgagtaggtttctatgagcaaaggaagaaaatataggaagatacagtggttacatagagatgggtttggagagaatggtacctaattttgtaaccctagagtgtccttagccccaaattcctgtccaaccaaaatatctcaatgtgaagatacacctttgttgtctactgagcagaggtagctaaacatttggactggctaagtaaggaaaatacttcccatgtcacttctgaactttttgtacatgtgcgagttggggagaggtggcaaggacattctccagcatggtggtagtcagctaaaattaaacttaagccagtgattggaggatcaacaaaaggataattatcgttttgcagtctatcatggaacatagtggaagaacaagatctttgaggtcagaaatacctgaattttaactccagccttgtcccttcctggtagaacaagttttgtgtggctttggaaaattaatctacatggtctttattttcctcaaatgcaaacaataactcccatagtgttgtagtaaagattaaatcagatgaaacggtcacagggccttctatattgtagaatgtcagtacttgatatcattatccactgtggaagaaaagattgtaaatttcttattctgaggattagtgagtttaaagtgcttatttgcatggttggcctaggtgttgttcttcaaaaaggactaattctagactctgctacaagcccactatacaatattgttgtgatctgataagcttttaaaaattgaatctgtaggccaggtgcagtggctcacgcttgtaatcccagcactttgggaggccgaggtgggcggatcacgaggtcaggaaattgagaccatcctggctaacacggtgaaaccccatctctactaaaaaagaatacaaaaaatttagctgggcatagtggcgggcgcctgtaatcccagctacttgggaggctgaggcagagaattgcttgaacccgggaggcggagcttgcagtgagcggagatcgcaccgctgcactccagcctgggcgacagagagagactctggaaaaaaaaaaaaaaaattgaatctgtaatgacttcagcatgctctccaatatcccaatggaatcattatgtttagtcagattgctcaaaattttctgagctctgttgtgccaagtttaaggcagccggaactctcttcccttgcagacagtgaaatttctctggtgtgaaatgatgctcatagatgtttatatgatgctcatattgggaggatgacttgccccaaatggcctgtcaccccaaatggttggtggtcttgtggtctattatccagggagacaccattgctccctgtcacattggtgacaagcagaagagattaggttgtcctttgatttgttgatacacatgccacgctgtcagatgatatttgagattatgccctgagctcagagatgcatagcgtgaggatgacatgtgacgggtatctctgtgccccattactgtggagcagcctctgctgcaagacctgacctctctggcatttacagaagatcctccttatccatggtttcgctttccataatttcagtaatgtgagatcaactggggtctgaaaataggtgagtataatacaatgagagagagagagagagagagaacattaacatacttgttactaaagtatattgctatacattttctattttattattagtgttgttaactcttactgtgcctgacttacaaactaaattttatcataggtatgtatgtatagaaaaaacgtatatagggttcagtactatattccatttgaggcatccattgggggtcttggaacatatcctccacagctaaacagtgacttctgtaccctctgtcagtgcagaatgaggtgcactgcattagcatcgtaggcctcggtttctctttacaacagacttggtaggtagctttacgttaatcactttgggtccaagctatgcatctggaaactggggataagaatactatttccatatctgtcaaaaggcagaggagtgaccacatggtccttccaactttaagtgttattacacccaatttttaatttttctgcttttctcttgccaaattctttctggttgtcctgtcctttatagataggacatcatcacctgaaattgagatatggagaaccaagctcagaattttatgttagaaactactatccacgcacttcctaatttttagagggacagaataagggtgatttgcatgtttgtctttactctcctgacaactgagacaggaaaccaaggataggagctcatgcaggtaaagaagaaacaggttcagatgtggacatgacaactttgaagtcactgtctgacatctacttcacagccaattagatcaaatttacaagccaccacacacatatatagtgctagtaaatatcagcatataagtggttaaaccatgggagtggatgagatccctcaggaaaattgcattgagttgaagaggaggtgtcaagcgtaaattgtgcttggatgtttggggtgaacagaagaagacattgcagtgaagaaggctgagaagcaccatcagagcagaaagaccaacagcacttggtgtcatgggggccatggaaggagaaagcctttatgggggcaggaggagcctgatcagtaatgtcgaatagaacagacactatataatcgaaggctttaacaacaaacatgaaaaaaggctcaacatcactgatcattagagaaatgggaatcaaaaccacaatgatataccatctcatgccagtcagaatggcgattattaaaaagtcaagagacagcagatgctggtgaggctgtggagaaatagaaatgcttttacactgttggtgggaatgtaaattggttcaaccattgtggaagacaatgtgacaatttctcagagatctagaaccagaaataccatttgacccagcaatcacattactggatgtgtacccaaaggaatagaaatcattctattatagagatacatgcacgtgtatgttcattgcagcgctattcacaatagcaaagacatagaatcaacccaaatgcccatcaacgatagactggataaaatgtggtacacatacaccatggaatactatgcagccataaaaaggaatgcgataatgtcctttgcagggacatggatggagctggaagccattatcctcagcaaactaatgcaggaacagaaaaccaaacgctgcatgttctcacttataagtgggagctgaacaatgtgaactcatagactcagagaggggtaaaacacacactggggcctgttgtggggggtggggataaagagagggagagtatcaggaaaaacagctaatgtgtgctgggcttaatacccaggtggtgggttgataggtgcagcaaaccaccatggcacacttttacctatgtaacaaacctgcacatcctgcacatgtattccagaaattaaatttaaaaaaaaattgaaggcattaaaaattaccttttgcttctgaagaccagacggtcattggtgattttaggaagagcattttcactaatagagtgggcatagagcacattttagttgattaaagaataaaggagaggaagacaagcctggattagacaatctggaaagagatgtcagttgttagaaggtgatcctttttgtctcttcactggggctttttgagtgacatgctggctcaagggaaagatccacagcaagggaagatgaaggcaaccaagtagatcattgagggagcaaagtcctggagtaattgtataggtgaaagggaaaagtctcatcttattatcttttgtaataagaagtagtttagttcattttctctaagaagaagctatgaagatgtgattagatgtgcaagagattcgttgagataacacttgtaaaggataaagaagaaagtggggagactcttcagatctcaggagaggtctgacacctgtgaaggagaggggaagaaaagaccaggtaggaaatgtgtctagctgtaagacagttccaagaaaggcctatggagtgaaaaaaaccttcatttaaagaagacacatgtcccacagaaatgggcgtggaaatgtcccctccattctcagtcaacaattgggagcagcatgctggaagcctggtcccaaagcagatgcagagggggacccagagtgtagcagctgaagtcagcagcaattacgcacgctctggacatctgagcagtgcgctttcatggtaaaaccctgatataactggctgatctggatgtgcagaaatgagaacaggaagataagtgagttcccaggtggtggcctcatttatttttgaagtatgaagtattaggattattctagctagaatgggaatagagaatggaattggagaaacttgagtgatggtttagaagagcagaaactgaaagaaggtaggactttgatctgcacaaggtctcattgagaatgggtcctgtaagggactgtgatgtgttgtggcattaacatggcatgactatgattttcctctagaaggatgtagtaagaatagagaaggtagattttgtgacttatctctttactgttaatgctactcctggttccaaggctgccccagttttataattcttaagttattagtaacttgtcctttatttgattaaacacacaaaaaaatacattgattgagccttatgtatgaagcacaggaggagatataagaatggatttctgccatccaggagtgtgtacttaacagcaatacctatgatgcaaggcagactacgacaggtaatataagagaggtagaaataaagcctatggaacttcagaagaggaatagagtatctgagtaggtaaaagagaggacagactcaaagactttatggaggtggcttggtttgggattcataaagtgggtataattgtgacagatttgttatctatgtctactattgtatggtagaaacctttcttctttttaatctgcctttcaaggccttcatctaggctggatggtgaccacctcatgcccagattactaatgaattgctcagtccctctttaaatctactgtctcatatatttgattacaaatacaactgggtaaattatgttgttcatataacctagaagttttggggccctctcccctgtttctcaagcataactgatgctacagtactttgtcctttttgcacatttccatgatgtcttattgtactaataagtgctctctagactgtgatgaactagttgagttataaccttgggtaggaaattacataagcttggtacatggtagtgttagagcaaggtcttagttatttgcttagttttctcacctgccagtgagtttgtaaatcacagtcaaggtcttggtttggagaggaagggaggtagctctgctgtattatttaatctgatttaccagtaaagaagctaatgttgaatgttgattcttcacttggataagactccagttgtttataatatggaattgtaatatggaataatattttcacacctcagtaatccataatgagttcctcttccacctttccagttacttgggataaaaactacctgaaattacaagatatgcaaaatgttgtataatcagggcctctatcttaaaaactgatttactactatttctgggaaatgtgcctattttacactttggaccttattcactgttgttaaatttttcagataaagctcaacacagtccagcaactagctatgcttagcctccttatcttcatttttaatgcgacaccgtgaactccagtcaagaaaacacatttaagaccctttacacttgactgatgcacctgaggctttgcagtgttatgcagaggtatcagtaaatatttaatagttgtgaatgaaattaaagtcctggaacccttgtccaactaaataggcccctccaagagactgctctgatgtcatttactcacatagccagtgcttagatgcttcatgattagtaatttttgtatcctttctggaggttttttgctctccatttggtggtaaactctggtaatgaatttttcactccaatttttgcctaggttgctactattggtctattagggtgccttttttcagacgaaaagacatcatcttttaggaaaccttgtcaaggtcaacaaaacatgaacttattttaataatccttttgtattaacagtatttacttttagaattatgaagatgtgtttatccttccaagcagcagtctgggttgttgccacttgaaaaaaaaatacggtctattggagttggagaataggcaggaaccttgatgtcataaaggaaaggaggtaaatggacagtaccttagtgtggttaaggaaagggctgagggaggtttagtctctctcagatgtggtagaaacttccatgtgagaacatttgccacctcagatgagaacactttttccattctccataagtctaactctaagctttttttttcttttttttttttttgtactttattttattctttgagaggtggggaggtgagctgccctttctttgacttaaggttcttacttttttggcttacaattctcagagactctggctgtctgcatacagaggccattcagagctccatttcaacaagcaattgcatatttgatccaataatcctccagcacgaggatttggcaatcctttcaaaaacattttccaagtagttcttaaaaccatcccttttcattaggcaagtgccaggtgaataaacatggccctaaacactgtccaccctgccttggcaagggaacatctaaggcttgggtaattgatttccccgtggttgcaagaagttcacataacattattcaatcatctctcaagtttgcttgtgattgctaaatcatttgtgacattggcctgacctcttacatttagacttccttattcttacctataaaacaagataaaaggattacttgattgatgtctccaaatggccagtctgtggaccactgaagcacactggctgcctcatgtccaagttcaactgtgaacttcctataacacaagccttaataactccatcctcttcctctccaactcctctcttagagacccttgtaattaatttaggtaaatggccagcgctcaggcctaaaattaggatctgccaaaggaatttaccatgaagttacacttgtaatgaccctccctaaacctccaaatattctcctcagaggtcgcaagataatgaagtagtcacagccatgtgctacagtcctgcaccagctagacctgtaccctcatacttccactacttgaccctggtagatctcatccagaatcaaagtctatcttttgctccgagtagaaaaatatgaatgagtaagattgtgctttctggtccagatgatcatgactcaaactacatggccatctggcccctccatctacagttagaagcaccaccttggcaataattgaaatgaactttcaacaaatctgctagagtcaagactgaattatgcattgttttataatatcattgccatatgaagagggaaacaattgtgtgtggcctatgaaaaaggtgttaccatccctggattgcaatttttttgttagttttttttgagacagagtctcactctgtaaccaggctggagcgcagtggcgtgatctcggttcattgcaacctccgcctcccaagattaagcgattctcctacctcagcctcccaagcagctgggactacaggcgtgcaccatcacacctagctaatttttgtattttcagtagagacgggctttcgccatgttggccaggatggtttcgatctcttgacctcgtgatctgcccaccttggcctcccaaagtgctgggattccaggcataagccactgtgcctggcctgttagggttttgtttgttttttttttttggcatgacaactttattgagatataattcacatacacataggatatcatacaatttgcccatttaaagtatacagttcagtggcttttagtatattcagttgtgcaactatcaccactatcaattttagaatcacctcaagaagaaaacccattccctttaactatcagcccctgtcctttctatctcccccagtcctaagcaacacttaatctactttctatctctgtatatttgtaaaattttaaaaaagattgttcaattggaagaatttttaaaatatatccacaataatatagtttatatgtgttatatatcattttcttaacatgtgttctctagcttggatttctcccttttctagatcattgatgtggagaaatagacactgggtcctgttctctgccctccatttgatctagtgcccacaactaaacacaattttctacaaaaataaaggcaggacaaatgggatagcataactgacccttctgatatactttttttataaaaaaggggaaaaaaattatcttctcaagttaggaactacagaattgacctggaaaaagagtgggcccaaaagaaagattcctaaagtatctcattagtgccatgactagcaggcaacataagcagctcgattagctcaccatatgattgacaggagatggagaagatgttgggggtggtggtggtggtggtagaattgggggaagagttatttatatttgggtgtggcatatgagtttcctcagagattcttgctttgggtattaaaagtgtttaatttttataaaaattttcaataaaaaggcaaatacctaagtgccctgaagaagtttgagacttagataccaattcaaaattcaagaattatgactgttctagaagtcttatgaaacttgtatacttcatctgtgtgatatttggcaatgtgcatcttgactttggcatagataagtcactcacctgaggttttaaagcaataactttttaatttagggtagactcttttttcagcttgttcatgagtgatagatactctgggaaggtggacacttttctcagtcgaagggaggtattattcatatggaattctatataaatgtatataaatggtgtcccctaaagcataagtctgttgatgagtctttaaagagactataccggttagattctacaatatacaggttgacaatatccgatgggaaatgtggcttgatttgaaattagaaggcagacattcaaatgactaatctcaagtctgcccccaaggtactgtataattctatgattctgggcttcatttttgaaaagtctaaagagatgatgaagtacatctgtcaagaaaggcatgagaagaaacaaaatgatccatcttggctgtgcaaatgctgtaatgaatggggaagttggtagatgtggtcttaacagggtgtaggcttgtgctgaaataaataaataaataaataaatacaaaccacaagactgacgtgactgcccagttgtgaacattgtatgaaggtttagttggcagagtaatgcttttcaagtatgttggataaatattaggtttaaaggccaagatacttataagtatttacaggattaagtgaggtataaaataatatttagtgtctcaaaggatgggaaggaagatagtgttgtggtcattccacagaggaagttagaactgcacatccaaaatttggttcagatatcaatgctaatgatgacacaaatacacacatacatatacacatacacctcaagatggtattaacaattttattattcatataatgaggtcttctgagaaaaacaggccaggctcccaagcaagtctaaaaatggattgagagaacagggagggagaattgacttggggttttatgtggtggagtagtgtggctggagagagagttgtcttgtgtaagctggggcttatttggtttgaatttctcaataatgcaaaagttgaggcatccaagcatctcatcagcttctctagatgtggcttgagttgccaggaggcaaattcaactgttagtgttttgtgtcctaagacatcttgtctaatctgaggtaaaagctttttcctattttttagaaggtgtataattttggctcttctgcttagctctaccatccattttgagttgatttttatatatgttataaattaaggattggagttttcttttattggtatttattgataatacaactgtttcagcatcatttgttgtaaagattgtttttctccatggaacaactttggcactttataaaaaaaaataagcatgtgtgagtgggtctatttttgaactctattctgttccaggatctgtacatttgtccttatgccagtaccaccttatcttaattaccgtagttttatagtaagtattttctgttaatgccaattctacaactttatttttttcaaaattgttttggctattttatatccttcatatttccatataaattttaggttcagcttattattttttataaaaaatcggaagtttttttgcaacttctgcaaaggttatcaaaaaccatcaaaggagattgctttgaatctatgaattatttgggggagaattgacatcttaaaaatattgatccttctcatccattgacatggtacatctccatgttttttaggttacagtgtacacatcttatatattttattaaagtacccatagatatttcttaattttgatgctattataaatatcttaaattacagtttgctagtatgtggaattacaatttatttttatatattgatcttgtatcttaggaccttactaacttatttattagttttagttgcttacttttaggttccttaatttttataacatcaatcacatctgcaaaaaaagttttactactttttcaccatgcaaactttaattttctttatcttgtctatttatactagctagaatctcacgtacaatgatgactagaggaggcaaaagtggtcatctttgtcatatttctgatctcaggggcaaacataatgttagctgtgttcattttgtttgttttttacagatgtacttttcaagttaagtgccttctcttcctggtcagctgagagttattttttaatcacaaatgaatgttaaattttgtcttatgtttttctgcctgtattgaaatgatcatgtgttttcctctcctgtgtttcacctttgttttagaaagatattttcactagataaagtttttaggttgacagtgtttttcttccagcacttaagaaatacttgattttcttccagcacttcagaaatatttgattttcttctgcagaatacagtttatgataaatcagaagtcattctttcctgtaacatgcctttttctctggctacgtttaagattttctctttatcacttagtacttcctaattaaaaatccatgccccagcagtggtcagctagcattctaaagaggaatgctgaggcagctaccacaaacacttctctaactttattattgattgacattacagcctttgctaattagtgtaataaatgtcagaaattagtaacttgacagtcagcttactggaagttagaattacgatcttgttggttaaataagtattcaaattctgtagcctggctaaagtattttgaagacactcttgagagagactagaacataagcatcaaaggaacccaagcaccttctgcaaggcagaaggggttcggtgggtatgaaatgatggaggtgggaaaggaagatcaaaaaaggggttgggtaatgccaaaacccaaatactggggattattagaagacatggttcaagagagaagctaatccatgggtgcaggccagtgtccagagagagagaccactgcaagaggccctgtctggatgttcaggacctctgagaatatattgtttgctggctgattgcccactttccacagggccagttctatttctttgttttttgccctcctattatccacttactccatgcaatgtgaccgcaagagttctaaaagcctacataatagacatgtaaataccggtggtggtgacagaggtggtgagagtgagaaactcacaaatttaattgagaggaacttgaactgaaatgggttcttggttaggctaggacaccaccattatatcatgatgatcatatttttatagttcttgtcaaacatatatctcctatagtacttgtatatgatagtactaggtattggaagccaaaataaatgagtaaagtatgaatagacttcgccttcaagcagctgacagggtttggttggtagtaaatatttggaacattttttttccccttaaagttcctggactcagctaggactagccaaatgaaatgtctctttaccaaaatgctcatcttcagcctgtgttgcttttttgcactcgtgtccacttttccggcttttggcccatttccttggctttgttgctccccacttcggttccagcaggtccttggtcactaccccccacataacaacatgcacctgggggcatcgcctgagcttaaaggcccccattcctcaattgtatctgatcccttccctctaactaaatgcaggattctgattccattccctcagcatttgggcaggaaaagaaatctcaactatttgagatgtgcctgatgaattacagaagcaaagaattctggagttagaagttatcttagttccaagttaaaaatccaggcccaggaaagtgtcacatggtcaatgacacaaatcactcaccggcagaacagggaggagtttcactacttcaattctctatttaccatatcacaaaatatgtaagatatcacattctaataatgtaattcagaaataagagaaggatagcgtagcaggaacaccacaccttgcctctcaaattacaccacacagaggctgcatattacactagttccaatttcattactcacaaagccaatcttgaaaatgcccaggtaaagtaaattgtcaggaagttctgaataataaactcgtttgataaaaccaactcacaatgcttcttccttaaaaatattttggtggaaatattattatatttggacataaataccccctgaaggacttgttaggaagaaaatagatcattgtttaggtcccttagcacagaggtctgaaagtcaaataaacttggtcaggctgttttctcttcctaaagagaataaaaggcccccaatcaatgggtggtcaccatagaaaaaattcggctctaagtcagagtgacttgaatatctgtgtgctatttttatttcagaaaaccaagaagacacaccaaaaaatcccgattaaaagggaagaaatgtgtttaaagagcttgttgacttcttaaaaacaaaaattcctgcatagattttggttaggattgctttaaatctgtagatttggagattttcaaaaatatagtacattattattattattgtttgagacagagtctcgctctgttgcccaggctggagtgcagtagcacgatctcagttcactgcagtctctgccttctgggttcaagcaattctcctgcctcagcctcccaagtagctgggattacaggtgcccgccaccacacccagctaatttttgtatttttcgtaaagacagggtttcaccatatcaaccaggctggtctagaactcctgacctcagataatccacccccctcagccttccaaagtgctgggattacaggcatgagccactgtgcatggccaatatattattattaaccatagtcatcatgatgtgcaatagatctcttgaacttatttctcccttctgattttttttttttttttgagacagggtctggctttgttgcctaggctagagtgcagtggcatgatcttggctcacagcaacctccacctcctgggctcaagccatcctcccaactcagcctcccaagtaactagtactacaggtgtacaccaccacacctggctacttttttttgtattttttgtagagatggggttttgccatgttgcccaggctggcctcaaactcctgagctcaggagattcacctgcctcagcctcccaaagtgctaagattacaggtgtgagccaccatgcctagcctttaactgaaattgtgtaccctttgagcaataccttcccaatctcctctccattctactctctacttctatgagttcatattttttaaagattctaccacgtaagtgagattatgtggtatttgtctttctgtgcctgacttattttgcttatcataatgtcctccaggttcatccacgttgtcacaaatgacaggatttccttaagactgaatagcattccattttgtatgtatgccatattttctttatccactcatctgttgatggacactgaggatgattccatatcttggaagttgtaaatagtgctacagtaaacatgggagtacagataatctctttgacacgctgacgtcatttcctttggaaatagccctaccagtagtatgattgctggatcctatgttctatttttctttttctttttccttttttttttaatttttattttttgagacagagtctcgctctgttgccaggctggagtgcagtgatgcaatcttggctcactgcaacctctgcctcccaggttcaaacaattttcctgcctcagcctcctgagtagctgggattacaggtgcatgccatcacacccagctaattattgtatttttagtagatatgggatttcaccatgttggccaggatggtcttgatctcttgaccttgtggtctgcctgcctcagcctcccaaagtgctgagattacaggcatgagccaccatgcccaacctatttttaatttttaaaggaacctctatactgttttttataatggctgtactaatttacatacctaccaacggtgtacaaggggccactctacatcctctccaacacttgttacctttcatctttttcgataatgattattctaacaggtgtgaggtgacatatccttgtggttttaatttgcattgccctgatgattcatatgttgagcattttttcatatccctgttgccttctcttgagaaatatctattcaggtcttttgcccacttaattgggttgttttcttgccattgagttgactttttatatattttggatattaatccttatcagctatgtggtttgcaaaaatgttcttccattctgtaggttccttcttcactctgttgattgtttcctttgctgtgtgatgctttttaatttaatgtaatttaatctcacttgtctatttttccataagaagagttgccagtgctgtttaccctggctgctacataccctgatccctgaagaccgtttcttgaaccattctgctctaaagtaatcctccttccatgatctttaccaagtgctttgtattattaatacatcactatactgatttcctttatagaacatacacaatgaaaaattatcttgctttgtttatttactcactgtctcagccctattaagatggaaaatgcctggcatgtcttaatgctttattcctagtccctagcacgatattactttaatgaataagtaaggtttgaagccactctgagtagatgtgaatatttgaattagcttaggagaaatatattctcgatttccttaaattacaactgaaatgacttttgtgatatgtatagctgatgcccttactataaggtatcaggatatactggaaaaacttgcaggattttttatttttccattgtgtttttctttctaggaggcagaaaaaccttctgaatttttaccatgatgacattaaagccagagatgttaagtgtcattgtagttagctctgtggccagaacctgagctggcaactcctgatatgagtgcttcactatgaaagacagactagatatggcaagtaactgcacattccttctcagtgtgtttcccagtcttctctttcaaattaacactcaatgggcatcctgatacacaactaaacatacatattcatggtcaaatccaggctaatagaggatatctattcactcatttcctcctttgacacctgtagaatgttatctgaataaaatgattttgcaaagggatgggatagaatttagaaagcatcgcattacttcagagagtgacttttctttaatgggtcttagttgttaagaacagatgcctaaataaggtgatgcctaaagtgatgcctggggctagtcaactgaatttaatgttcactaaggattaactgctcacaaaaactgtatttgtgaaaaattgaccttgtctatccaaattggctacttctaataactagcttttatagtctacttgttttcttttttacataaacaactacaaaatgtattagtctattttggagaaactcttaaaatagaatgaaattgaaaattgctaaagtgttatagttattttcagttagatatttctatgaattattttatacactcatggtttaaaatccaattttcataatatagttgccagcatctgtgaattattacaatttgaaaagatttggaatgccataactttttaaaaatgttctgctctgatctttatttcctttcttctaactctgggcttagtttgtccttgttttctttttttttattattattatactttaagttctgagatacatgtgcagaatgtgcaggtttgttacatagttatacacgtgacatggtggtttgctgcacccatcaacccgtcatctacattaggtatttctcctaatgctctctctaccctagccccccacccaccgacagaccctggtgtgtgatgttcccttccctgtgtccatgtgttctcgtggttcaactcccacttatgagaacatgcggtgtttggttcctgtgttagtttgctgagaatgatggtttccaactttatccatgtccctgcaaaggacatgaactcatccttttttatggctgcatagtattccacagtgtatatgtgccacatttctttatccagtttgtcactggtgggcatttggggtggttccaagcctttgctattgtgaacagtactgcaataaacatacttgtgcatgcgtctttatagtagaatgatttataatcctgtgggtatatacccagtaatgggattgcttttctaatgtcttgaggtatgacatttaggttattttggatctttgtccttttttaatgtatattactataaacttccctcataaaactggtttgccgcaccccgtaaggtttggtatggtgtttccatttttgtctcaagacattttaaatttgccttttaatttattcattgatccattggtagttaagcatgttaattttcatatattattgaattttctgaaatttcttattgatttctaatttcataccataggtcagaaaagatatttgatatgatttcaatcttcttaaagctaagtcttgttttgtggcttaataatgacctatcctggagaatgttctgtgtgtgcttgagaagaatatattctgctgttggaagaaatgttctgtatatacctatgtccatttggtctaaagtgtagtttaagttcaatatttccatatcgattggatgatctgtccattgttgaaagcgggatattgaagtctcctactgttattgtattgctccaacttctgatccttaaaatttgcttcatatagaataccataaaaagttctgagatattgattacttattttatgaatgtgtgaggcaactaggaaggctttactgcgttatctaacactcatggacaacctgtaggtttttttaactacagagaaaacgtaatagaaaagatgtgccaggcacagtggctcatgcttgtaattaatcccagcactttgggaggccgaagcaggtggatcacttgaggtcaggagtccaagaccagcctggccaacatggtgaaaccccgtctctactaaaaataaaaaattagctgagcgtggtggtgcatgcctgcaatctcagctacttggaggttgaggctggagaatcgcttgaatctgggaggtggaggttgcagtgagctgatattgcaccactgcactccagctgggtgacagagactccatcttaaaaaaaaaaaaaaaaaaaaaaaaaagattaacttgtctcatgccacacagctaataaatggcagtgcttaattcatccccaaggctgtttaccaccaaagactatatgacccctcaatgcagcctccacttaagtaatgcagttaagaactgccaacactaggtgccatgatagggtattgactctcaaagatatttgaccatgacccagttatattttgtgtcacatatacatacattcctacatccacgatagaaacaaaagtctcaccaacagttcttgtattgactgtgagacaataaaagatgactctgacattttctaatttttaatgctagttgtaactcactaaattgctataatgacccactggtattatacctgtatttgaaagccgtgttctaaatgtcctttttagacatcttgcagtctgccctcaattacaaaaagtgcatttgttgaatgttactgacagtcacatggatcaattactacaagtcatcttaataatgtattccaaaaatggttttgttttctcacctctagtccttgagtacactaatgggatctttatcttcagaaaagctgctaatataaaacacaatgccttatcactaacaaatcaaattagatataatctaagcaggtgtatgtgagcaggaaaaaaaccacattagagccacctgaatctagatatgatctatgattttgacagcattcagttttgttctcaagatcagtgacataatctttactacatattgttatttttaaggtatgtgcagttttgtaacagcaatacaatgcaggtatgtacacttcattgtaaataaccattctggcgaaaaaaaggctttcaatgactttggacaagtaaatgattcttggtacaaaatcatacttctttggtatttatgaaaaaaaaggaaggtgttttaactctgagcacccaattcctggtgctccatttaagtatttaagatgtttctaattagggttgagtcttgttgtgaacagctagtgaaatactaacatgggagggcaagttttatgagcattgataaattgaacacaaattatctgttacagagactacaaagagctatagataaaaagtacagcaaaatgatttcatgaaatcaatattttattcagtgtcaaagcatcttaactgaattgtgtaagtaattttgtctgtaattttagaagtaacatttgtagaaaatatcaatattatcagttgtgctactagaaatattgaaggagttaattctgaatttattcatttatgcagttatctatatccacttaggtacaaaacttttgtaagaaagataacacttttattgcattataatttcatattttacaggagtcataatgcaaacttataagcataaatatatacatgatgctaccaaatggcaatgtaaccactaagagatttaaaacataaaactagaatttaacaagcaaaatacttaatatggcttttaatggaaaataactgtttagaaatgatttgttattgccccattctagtcattccccatcaagtgaacataaaattatgatctccatttaaaacggtacaagttatctaagccaactttgtacttttttgctacttttttgtagcatgtatgcagtatgatttctggacttccttaaatatacatacatatatacatatatacagatatacagtacacagttctgttttaatacccctgaacatcttgattaaaactattacaatttttctattataaaactacttgaaaagttggcataacttcctggtattgaagttcaatcctacagaattaaaaaaaaaagcaacaaaatgttggttataaatacattctttacaaaaaaaaattgaatagtggtcccgcactcataatttatattacagtgaaaacattttatcaatttaaaggtatttgtatcttgttgtccttggtttctgtgtgaaatagaggaagttaataatgagaatattgtaggcaggcctatttgttaggtttttctaggtgttcatttttgtgtaagttccaattcacttcttttgagttgttgttgatttctatttgccttgtattactgctgctgctgcttcttttggtgttctgggaacactgggtgactttacttctaggaacaggaagaaaagatttaactcttgaaacacccaactcagtctttgatttactgttgctgcattcagtagtttgatggctgctgagaggactgacctcctgtaagagacaagaaaccacacaagtttatcacaaacttctcctgttatgagccctacccctgcctcctctttgagcaaatgtacaggagtttctctctaaaactataggttctcgtgaaaaatcaaaagaaaatggagaggagaagctgagtaattaatttcctatagacttactgcatgattttcattaatccatctgctgttacaaaattcctaaatacaggagtcagtgaatcaagtgctaaggcgtcgatctccttaccaacagaaacttcacaaaattacaggcatgaggaaatcaccaaattggagtagtcccatttgtaggtagctctacaaactatgtcaccttgggtaaatcacctaacttttctgctttctactttcaagtcttaaaagtgaactattactcaataatcaaataatctgggggcatataggagaaaacataagagaaacattccttccctagcagaacctacattcatctatggttaggccactcaagatcttccatacttggaagctgcatgttctcatttctctaatgtttcagaaatcctgtgattacctggtcaatgtctctcattttgcccatgaagaatctgagagctggataggtaagatgatttgcccacagtgaacggagtggtgaagctgggacaagacctcaggtctcccaactttcactcaaggtattttccctatattgcattaaattctgcaaactaacaaacatgacatgactcctactaagtgacctactctgaatgcctctgaaggagttgaccttgataacttctcctcttcaaaagtaataatgcacccaacagcaatataaccattacaagaatttaaaacaaaactaaaatttaacaggaaaaatctggcttcatctggcagttgcggcagttgcattctcctgggtatcgtcttatatgacattggaatcacctgggggagctttaatagtcattggctgggccctattaccagagattcatatttaatagttctggggtgtggcatggacatacgattttaaaaaatcttgcggccaaagaacgcctagcttaactcctcactatcctttttctccattgagcaattaaatcaagggtccccaagccacaggctgtggaccagtccatggcctattaataactgggcagcacagcaggacgtgagcgggggcgagccagtattaccacctgagctccgcctcctgtcagatcagcagcattagattctcatagtagtacaaaccctcttgtgaattgtgcaagtgaggggtctaggttgcccagtccttgcgagaatctaatgcctaaagatctgagatggaacagtttcatccggaaactacccaggtccgtggaaaaattgtcttccacgaaaccagtctccagtgccaaaatggctggggactgctgtcctaaatggtagcatttttcttagccctctataagtcacacattgataatctttcccttcagagtatttcaagctctaagtatttcccaaagttctttctttagccctcatttatctcctgcatttccaccccactaattcacctatatgtctagccacacttcaaattctttctaaaactgtatttattgcatttcttcaatactaatttctaaagcctttccgcttggctcattactggctaatgctgctctcccagtgaatttagcaggaaatcctcagttatctttagcagctgcctttctctctctcctcaccaacctaatccaatgttacccacaaaatgggcagagaattatggctgtgtttgtgtgaataggaaggtaaaggataagtcctcactaactggcatgtcactaaagttcttttaaagtttggctccaatcccctttaaatcctatttttcctttacttccctgttaaagtcctaattctttaaagcccaacacaacatgttcattaaactacccctaaatcaccaaagtgaaatctcttggggtcagattttcagactcagctaatcttaagtggaacagcaatgtaactctaatatatacttggctagtggtttgggaaaatataaaaacactgaaacaacaaatatgtaatggagaataaagaggggacaaatctggggtccaggccacctgcatttacagggaaaggaaagagaagtctagactgcaagaagctagcttagaaaggcaagagcttcctgataaaacaaaaaacagatgggctcggttttaactacgtccgaggaagcctggaaaaaggctgagctacatctggtgagggaacacatcctagtccatcctcgtcacctccatgtgtacttgatggtatgttaagggcgaatctgcttagtatgttctgcttttgttttgtaaagatgcttatgctgtcaagttaccagaaagaaaatgagaagttacattgcttgtcatgagttggatggtgatagtcacaactgtaaaaacagtgcaggtaccaggatccaatctcatttttcctaacaagaaattactgttaagtccgcaaaatgggacttggtcatgggcctactaaggccaattagaacttgtaatttggtttaaaacaccagcaaatgcaacacatacgtagtattcagaaaacatgaaatatggcattataataaggataacagttagttgctatacagaatctggtggtgaggggagttgtttaattttgccattattgtcaaatctacagagttaattaatgccatggcccagaggaaggaaaggagacatacactgttctagtctgtttctgtacctgcaacatgatggtgaggggagtgtaccttcatggtctgaggcaggaaatatccacatgaaataaagtactgagaagtacccagaacaactaaaaacatgtagtttggtcagtccctggaagtgtgaggctagaatggaaggagttaggatgagaacatggagaatcacttgggcttagcgtgagccacagcaattcaaggccaggagtgcaagaatagagcaggtgaccaatgcacagcatcctgcctgaaaagtgctcctgacaccctggaagtcaagcctagggggcagcggagtttaggagcaggagagttacaggtgtttaatgcttcctgggctaaaacccccgaattatctgtattaaatgtataacgtttactatccatattgctgtgcatgttaaactcaaaaactaatttgtgtagaaaggcactgacctaaagtaagttttatttagccttaaagaattggtaaatcagagcaattcattcaatacacagcatctactagaagctaagaagatattgtaattcctctagatgggaaagttaggggcaggaggaaaagaacaacatgtagggaaggtggcattgggggtgagtctttaaagaggcacaggactgtgacgagagaaggttctatggggaggagtacagagggaagtagtaaattacatgtaaaaaaggaacatgtgaaaagctacatgaaggcatctcaatccctctaaagatatatttggaaagaaagaaatgggtggaaaatgaagatgacagatcagggctatgttttagaacagtgggtctcaaccctggatgcatgtaagaatcaccagggacctttaaaaaacccattgtccaggcttcccctcagactagagtccaggccctgaagttaaaaaaaaaaaaaaaaaagaagcctcaagtggatttcatcatgcaaccaaagatgtgaacttgtcctttcagaggattagtttggatttacataaaaggaaaacatttattaacatttgttcttcctgttgatttaaatatgtatatttgtttttaattcagaaggcctgctaaatgccacttgattagtaaacccaattactctcccttactgttagagcagtgaggagttatattgttgcaaataataaagataacttactcatttttgttttccaacagataatgatggttgcagggcccctcttcaatggaggcattgccagccttctggccatgaaggagaaagtgatttcaactaacccaggaaactcttacctctaaatggagatacttcctgataacagaagaaactgggcatctaacccagaaataccagctgagtaggagaagagaaaaggcatcagccagtcaaggtttcagaaggctgccaaca

SEQ ID NO: 131 - DNA, 300 bp, Homo sapiens
  source 1..300: mol_type = genomic DNA
atatgccagaaaagttgaatagtatcagattccaaatctgtatggagaccaaatcaagtgaatatctgttcctcctctctttattttagctggaccagaccaattttgaggaaaggatacagacagcgcctggaattgtcagacatataccaaatcccttctgttgattctgctgacaatctatctgaaaaattggaaaggtatgttcatgtacattgtttagttgaagagagaaattcatattattaattatttagagaagagaaagcaaacatattataagtttaattcttatattta

SEQ ID NO: 132 - DNA, 420 bp, Homo sapiens
  source 1..420: mol_type = genomic DNA
tctcctctaaagatgaaaagtcttgtgttgaaattctcagggtattttatgagaaataaatgaaatttaatttctctgtttttccccttttgtaggaagtcaccaaagcagtacagcctctcttactgggaagaatcatagcttcctatgacccggataacaaggaggaacgctctatcgcgatttatctaggcataggcttatgccttctctttattgtgaggacactgctcctacacccagccatttttggccttcatcacattggaatgcagatgagaatagctatgtttagtttgatttataagaaggtaatacttccttgcacaggccccatggcacatatattctgtatcgtacatgttttaatgtcataaattaggtagtgagctggtacaagtaagggataaatgctgaaat

SEQ ID NO: 133 - DNA, 300 bp, Homo sapiens
  source 1..300: mol_type = genomic DNA
cctttacttaataatgaatgcataataactgaattagtcatattataattttacttataatatatttgtattttgtttgttgaaattatctaactttccatttttcttttagactttaaagctgtcaagccgtgttctagataaaataagtattggacaacttgttagtctcctttccaacaacctgaacaaatttgatgaagtatgtacctattgatttaatcttttaggcactattgttataaattatacaactggaaaggcggagttttcctgggtcagataatagtaattagtggt

SEQ ID NO: 134 - DNA, 300 bp, Homo sapiens
  source 1..300: mol_type = genomic DNA
ttgaataaaagaaatatgacttaaaaccttgagcagttcttaatagataatttgacttgtttttactattagattgattgattgattgattgattgatttacagagatcagagagctgggaagatcagtgaaagacttgtgattacctcagaaatgattgaaaatatccaatctgttaaggcatactgctgggaagaagcaatggaaaaaatgattgaaaacttaagacagtaagttgttccaataatttcaatattgttagtaattctgtccttaattttttaaaaatatgtttatcat

SEQ ID NO: 135 - DNA, 300 bp, Homo sapiens
  source 1..300: mol_type = genomic DNA
attattaaaattcatatataagatgtagcacaatgagagtataaagtagatgtaataatgcattaatgctattctgattctataatatgtttttgctctcttttataaataggatttcttacaaaagcaagaatataagacattggaatataacttaacgactacagaagtagtgatggagaatgtaacagccttctgggaggaggtcagaatttttaaaaaattgtttgctctaaacacctaactgttttcttctttgtgaatatggatttcatcctaatggcgaataaaattagaatg

SEQ ID NO: 136 - DNA, 360 bp, Homo sapiens
  source 1..360: mol_type = genomic DNA
gcatctattgaaaatatctgacaaactcatcttttatttttgatgtgtgtgtgtgtgtgtgtgtgtttttttaacagggatttggggaattatttgagaaagcaaaacaaaacaataacaatagaaaaacttctaatggtgatgacagcctcttcttcagtaatttctcacttcttggtactcctgtcctgaaagatattaatttcaagatagaaagaggacagttgttggcggttgctggatccactggagcaggcaaggtagttcttttgttcttcactattaagaacttaatttggtgtccatgtctctttttttttctagtttgtagtgctggaaggtatttttggagaaattctt

SEQ ID NO: 137 - DNA, 420 bp, Homo sapiens
  source 1..420: mol_type = genomic DNA
caaataagaatatacacttctgcttaggatgataattggaggcaagtgaatcctgagcgtgatttgataatgacctaataatgatgggttttatttccagacttcacttctaatggtgattatgggagaactggagccttcagagggtaaaattaagcacagtggaagaatttcattctgttctcagttttcctggattatgcctggcaccattaaagaaaatatcatctttggtgtttcctatgatgaatatagatacagaagcgtcatcaaagcatgccaactagaagaggtaagaaactatgtgaaaactttttgattatgcatatgaacccttcacactacccaaattatatatttggctccatattcaatcggttagtctacatatatttatgtttcctctatgggtaagctact

SEQ ID NO: 138 - DNA, 240 bp, Homo sapiens
  source 1..240: mol_type = genomic DNA
catgtagtgaactgtttaaggcaaatcatctacactagatgaccaggaaatagagaggaaatgtaatttaatttccattttctttttagagcagtatacaaagatgctgatttgtatttattagactctccttttggatacctagatgttttaacagaaaaagaaatatttgaaaggtatgttctttgaataccttacttataatgctcatgctaaaataaaagaaagacagactgtccc

SEQ ID NO: 139 - DNA, 300 bp, Homo sapiens
  source 1..300: mol_type = genomic DNA
gattcaagtaatactattcttttattttcatatattaaaaataaaaccacaatggtggcatgaaactgtactgtcttattgtaatagccataattcttttattcaggagtgcttttttgatgatatggagagcataccagcagtgactacatggaacacataccttcgatatattactgtccacaagagcttaatttttgtgctaatttggtgcttagtaatttttctggcagaggtaagaatgttctattgtaaagtattactggatttaaagttaaattaagatagtttggggatgta

SEQ ID NO: 140 - DNA, 180 bp, Homo sapiens
  source 1..180: mol_type = genomic DNA
gtgatgtgaatttagatgtgggcatgggaggaataggtgaagatgttagaaaaaaaatcaactgtgtcttgttccattccaggtggctgcttctttggttgtgctgtggctccttggaaagtgagtattccatgtcctattgtgtagattgtgttttatttctgttgattaaatattgta

SEQ ID NO: 141 - DNA, 420 bp, Homo sapiens
  source 1..420: mol_type = genomic DNA
tttcaggtacaagatattatgaaattacattttgtgtttatgttatttgcaatgttttctatggaaatatttcacaggcaggagtccaattttcactcatcttgttacaagcttaaaaggactatggacacttcgtgccttcggacggcagccttactttgaaactctgttccacaaagctctgaatttacatactgccaactggttcttgtacctgtcaacactgcgctggttccaaatgagaatagaaatgatttttgtcatcttcttcattgctgttaccttcatttccattttaacaacaggtactatgaactcattaactttagctaagcatttaagtaaaaaattttcaatgaataaaatgctgcattctataggttatcaatttttgatatctttagagtttagtaattaaca

SEQ ID NO: 142 - DNA, 600 bp, Homo sapiens
  source 1..600: mol_type = genomic DNA
taaccaagtgacaaatagcaagtgttgcattttacaagttattttttaggaagcatcaaactaattgtgaaattgtctgccattcttaaaaacaaaaatgttgttatttttatttcagatgcgatctgtgagccgagtctttaagttcattgacatgccaacagaaggtaaacctaccaagtcaaccaaaccatacaagaatggccaactctcgaaagttatgattattgagaattcacacgtgaagaaagatgacatctggccctcagggggccaaatgactgtcaaagatctcacagcaaaatacacagaaggtggaaatgccatattagagaacatttccttctcaataagtcctggccagagggtgagatttgaacactgcttgctttgttagactgtgttcagtaagtgaatcccagtagcctgaagcaatgtgttagcagaatctatttgtaacattattattgtacagtagaatcaatattaaacacacatgttttattatatggagtcattatttttaatatgaaatttaatttgcagagtcctgaacctatataatgggtttattttaaatgtgattgtacttgcagaata

SEQ ID NO: 143 - DNA, 360 bp, Homo sapiens
  source 1..360: mol_type = genomic DNA
ttccaatggtttttattgaagtacaatactgaattatgtttatggcatggtacctatatgtcacagaagtgatcccatcacttttaccttataggtgggcctcttgggaagaactggatcagggaagagtactttgttatcagcttttttgagactactgaacactgaaggagaaatccagatcgatggtgtgtcttgggattcaataactttgcaacagtggaggaaagcctttggagtgataccacaggtgagcaaaaggacttagccagaaaaaaggcaactaaattatattttttactgctatttgatacttgtactcaagaaattcatattactctgcaaaatatatttgttatg

SEQ ID NO: 144 - DNA, 360 bp, Homo sapiens
  source 1..360: mol_type = genomic DNA
gggtgtttcttattttaaaataatttttctacttgaaatattttacaatacaataagggaaaaataaaaagttatttaagttattcatactttcttcttcttttcttttttgctatagaaagtatttattttttctggaacatttagaaaaaacttggatccctatgaacagtggagtgatcaagaaatatggaaagttgcagatgaggtaaggctgctaactgaaatgattttgaaaggggtaactcataccaacacaaatggctgatatagctgacatcattctacacactttgtgtgcatgtatgtgtgtgcacaactttaaaatggagtaccctaacatacctggagcaacaggta

SEQ ID NO: 145 - DNA, 6132 bp, Homo sapiens
  source 1..6132: mol_type = genomic DNA
aattggaagcaaatgacatcacagcaggtcagagaaaaagggttgagcggcaggcacccagagtagtaggtctttggcattaggagcttgagcccagacggccctagcagggaccccagcgcccgagagaccatgcagaggtcgcctctggaaaaggccagcgttgtctccaaactttttttcagctggaccagaccaattttgaggaaaggatacagacagcgcctggaattgtcagacatataccaaatcccttctgttgattctgctgacaatctatctgaaaaattggaaagagaatgggatagagagctggcttcaaagaaaaatcctaaactcattaatgcccttcggcgatgttttttctggagatttatgttctatggaatctttttatatttaggggaagtcaccaaagcagtacagcctctcttactgggaagaatcatagcttcctatgacccggataacaaggaggaacgctctatcgcgatttatctaggcataggcttatgccttctctttattgtgaggacactgctcctacacccagccatttttggccttcatcacattggaatgcagatgagaatagctatgtttagtttgatttataagaagactttaaagctgtcaagccgtgttctagataaaataagtattggacaacttgttagtctcctttccaacaacctgaacaaatttgatgaaggacttgcattggcacatttcgtgtggatcgctcctttgcaagtggcactcctcatggggctaatctgggagttgttacaggcgtctgccttctgtggacttggtttcctgatagtccttgccctttttcaggctgggctagggagaatgatgatgaagtacagagatcagagagctgggaagatcagtgaaagacttgtgattacctcagaaatgattgaaaatatccaatctgttaaggcatactgctgggaagaagcaatggaaaaaatgattgaaaacttaagacaaacagaactgaaactgactcggaaggcagcctatgtgagatacttcaatagctcagccttcttcttctcagggttctttgtggtgtttttatctgtgcttccctatgcactaatcaaaggaatcatcctccggaaaatattcaccaccatctcattctgcattgttctgcgcatggcggtcactcggcaatttccctgggctgtacaaacatggtatgactctcttggagcaataaacaaaatacaggatttcttacaaaagcaagaatataagacattggaatataacttaacgactacagaagtagtgatggagaatgtaacagccttctgggaggagggatttggggaattatttgagaaagcaaaacaaaacaataacaatagaaaaacttctaatggtgatgacagcctcttcttcagtaatttctcacttcttggtactcctgtcctgaaagatattaatttcaagatagaaagaggacagttgttggcggttgctggatccactggagcaggcaagacttcacttctaatggtgattatgggagaactggagccttcagagggtaaaattaagcacagtggaagaatttcattctgttctcagttttcctggattatgcctggcaccattaaagaaaatatcatctttggtgtttcctatgatgaatatagatacagaagcgtcatcaaagcatgccaactagaagaggacatctccaagtttgcagagaaagacaatatagttcttggagaaggtggaatcacactgagtggaggtcaacgagcaagaatttctttagcaagagcagtatacaaagatgctgatttgtatttattagactctccttttggatacctagatgttttaacagaaaaagaaatatttgaaagctgtgtctgtaaactgatggctaacaaaactaggattttggtcacttctaaaatggaacatttaaagaaagctgacaaaatattaattttgcatgaaggtagcagctatttttatgggacattttcagaactccaaaatctacagccagactttagctcaaaactcatgggatgtgattctttcgaccaatttagtgcagaaagaagaaattcaatcctaactgagaccttacaccgtttctcattagaaggagatgctcctgtctcctggacagaaacaaaaaaacaatcttttaaacagactggagagtttggggaaaaaaggaagaattctattctcaatccaatcaactctatacgaaaattttccattgtgcaaaagactcccttacaaatgaatggcatcgaagaggattctgatgagcctttagagagaaggctgtccttagtaccagattctgagcagggagaggcgatactgcctcgcatcagcgtgatcagcactggccccacgcttcaggcacgaaggaggcagtctgtcctgaacctgatgacacactcagttaaccaaggtcagaacattcaccgaaagacaacagcatccacacgaaaagtgtcactggcccctcaggcaaacttgactgaactggatatatattcaagaaggttatctcaagaaactggcttggaaataagtgaagaaattaacgaagaagacttaaaggagtgcttttttgatgatatggagagcataccagcagtgactacatggaacacataccttcgatatattactgtccacaagagcttaatttttgtgctaatttggtgcttagtaatttttctggcagaggtggctgcttctttggttgtgctgtggctccttggaaacactcctcttcaagacaaagggaatagtactcatagtagaaataacagctatgcagtgattatcaccagcaccagttcgtattatgtgttttacatttacgtgggagtagccgacactttgcttgctatgggattcttcagaggtctaccactggtgcatactctaatcacagtgtcgaaaattttacaccacaaaatgttacattctgttcttcaagcacctatgtcaaccctcaacacgttgaaagcaggtgggattcttaatagattctccaaagatatagcaattttggatgaccttctgcctcttaccatatttgacttcatccagttgttattaattgtgattggagctatagcagttgtcgcagttttacaaccctacatctttgttgcaacagtgccagtgatagtggcttttattatgttgagagcatatttcctccaaacctcacagcaactcaaacaactggaatctgaaggcaggagtccaattttcactcatcttgttacaagcttaaaaggactatggacacttcgtgccttcggacggcagccttactttgaaactctgttccacaaagctctgaatttacatactgccaactggttcttgtacctgtcaacactgcgctggttccaaatgagaatagaaatgatttttgtcatcttcttcattgctgttaccttcatttccattttaacaacaggagaaggagaaggaagagttggtattatcctgactttagccatgaatatcatgagtacattgcagtgggctgtaaactccagcatagatgtggatagcttgatgcgatctgtgagccgagtctttaagttcattgacatgccaacagaaggtaaacctaccaagtcaaccaaaccatacaagaatggccaactctcgaaagttatgattattgagaattcacacgtgaagaaagatgacatctggccctcagggggccaaatgactgtcaaagatctcacagcaaaatacacagaaggtggaaatgccatattagagaacatttccttctcaataagtcctggccagagggtgggcctcttgggaagaactggatcagggaagagtactttgttatcagcttttttgagactactgaacactgaaggagaaatccagatcgatggtgtgtcttgggattcaataactttgcaacagtggaggaaagcctttggagtgataccacagaaagtatttattttttctggaacatttagaaaaaacttggatccctatgaacagtggagtgatcaagaaatatggaaagttgcagatgaggttgggctcagatctgtgatagaacagtttcctgggaagcttgactttgtccttgtggatgggggctgtgtcctaagccatggccacaagcagttgatgtgcttggctagatctgttctcagtaaggcgaagatcttgctgcttgatgaacccagtgctcatttggatccagtaacataccaaataattagaagaactctaaaacaagcatttgctgattgcacagtaattctctgtgaacacaggatagaagcaatgctggaatgccaacaatttttggtcatagaagagaacaaagtgcggcagtacgattccatccagaaactgctgaacgagaggagcctcttccggcaagccatcagcccctccgacagggtgaagctctttccccaccggaactcaagcaagtgcaagtctaagccccagattgctgctctgaaagaggagacagaagaagaggtgcaagatacaaggctttagagagcagcataaatgttgacatgggacatttgctcatggaattggagctcgtgggacagtcacctcatggaattggagctcgtggaacagttacctctgcctcagaaaacaaggatgaattaagtttttttttaaaaaagaaacatttggtaaggggaattgaggacactgatatgggtcttgataaatggcttcctggcaatagtcaaattgtgtgaaaggtacttcaaatccttgaagatttaccacttgtgttttgcaagccagattttcctgaaaacccttgccatgtgctagtaattggaaaggcagctctaaatgtcaatcagcctagttgatcagcttattgtctagtgaaactcgttaatttgtagtgttggagaagaactgaaatcatacttcttagggttatgattaagtaatgataactggaaacttcagcggtttatataagcttgtattcctttttctctcctctccccatgatgtttagaaacacaactatattgtttgctaagcattccaactatctcatttccaagcaagtattagaataccacaggaaccacaagactgcacatcaaaatatgccccattcaacatctagtgagcagtcaggaaagagaacttccagatcctggaaatcagggttagtattgtccaggtctaccaaaaatctcaatatttcagataatcacaatacatcccttacctgggaaagggctgttataatctttcacaggggacaggatggttcccttgatgaagaagttgatatgccttttcccaactccagaaagtgacaagctcacagacctttgaactagagtttagctggaaaagtatgttagtgcaaattgtcacaggacagcccttctttccacagaagctccaggtagagggtgtgtaagtagataggccatgggcactgtgggtagacacacatgaagtccaagcatttagatgtataggttgatggtggtatgttttcaggctagatgtatgtacttcatgctgtctacactaagagagaatgagagacacactgaagaagcaccaatcatgaattagttttatatgcttctgttttataattttgtgaagcaaaattttttctctaggaaatatttattttaataatgtttcaaacatatataacaatgctgtattttaaaagaatgattatgaattacatttgtataaaataatttttatatttgaaatattgactttttatggcactagtatttctatgaaatattatgttaaaactgggacaggggagaacctagggtgatattaaccaggggccatgaatcaccttttggtctggagggaagccttggggctgatgcagttgttgcccacagctgtatgattcccagccagcacagcctcttagatgcagttctgaagaagatggtaccaccagtctgactgtttccatcaagggtacactgccttctcaactccaaactgactcttaagaagactgcattatatttattactgtaagaaaatatcacttgtcaataaaatccatacatttgtgtgaaa

SEQ ID NO: 146 - protein, 1480 aa, Homo sapiens
MQRSPLEKASVVSKLFFSWTRPILRKGYRQRLELSDIYQIPSVDSADNLSEKLEREWDRELASKKNPKLINALRRCFFWRFMFYGIFLYLGEVTKAVQPLLLGRIIASYDPDNKEERSIAIYLGIGLCLLFIVRTLLLHPAIFGLHHIGMQMRIAMFSLIYKKTLKLSSRVLDKISIGQLVSLLSNNLNKFDEGLALAHFVWIAPLQVALLMGLIWELLQASAFCGLGFLIVLALFQAGLGRMMMKYRDQRAGKISERLVITSEMIENIQSVKAYCWEEAMEKMIENLRQTELKLTRKAAYVRYFNSSAFFFSGFFVVFLSVLPYALIKGIILRKIFTTISFCIVLRMAVTRQFPWAVQTWYDSLGAINKIQDFLQKQEYKTLEYNLTTTEVVMENVTAFWEEGFGELFEKAKQNNNNRKTSNGDDSLFFSNFSLLGTPVLKDINFKIERGQLLAVAGSTGAGKTSLLMVIMGELEPSEGKIKHSGRISFCSQFSWIMPGTIKENIIFGVSYDEYRYRSVIKACQLEEDISKFAEKDNIVLGEGGITLSGGQRARISLARAVYKDADLYLLDSPFGYLDVLTEKEIFESCVCKLMANKTRILVTSKMEHLKKADKILILHEGSSYFYGTFSELQNLQPDFSSKLMGCDSFDQFSAERRNSILTETLHRFSLEGDAPVSWTETKKQSFKQTGEFGEKRKNSILNPINSIRKFSIVQKTPLQMNGIEEDSDEPLERRLSLVPDSEQGEAILPRISVISTGPTLQARRRQSVLNLMTHSVNQGQNIHRKTTASTRKVSLAPQANLTELDIYSRRLSQETGLEISEEINEEDLKECFFDDMESIPAVTTWNTYLRYITVHKSLIFVLIWCLVIFLAEVAASLVVLWLLGNTPLQDKGNSTHSRNNSYAVIITSTSSYYVFYIYVGVADTLLAMGFFRGLPLVHTLITVSKILHHKMLHSVLQAPMSTLNTLKAGGILNRFSKDIAILDDLLPLTIFDFIQLLLIVIGAIAVVAVLQPYIFVATVPVIVAFIMLRAYFLQTSQQLKQLESEGRSPIFTHLVTSLKGLWTLRAFGRQPYFETLFHKALNLHTANWFLYLSTLRWFQMRIEMIFVIFFIAVTFISILTTGEGEGRVGIILTLAMNIMSTLQWAVNSSIDVDSLMRSVSRVFKFIDMPTEGKPTKSTKPYKNGQLSKVMIIENSHVKKDDIWPSGGQMTVKDLTAKYTEGGNAILENISFSISPGQRVGLLGRTGSGKSTLLSAFLRLLNTEGEIQIDGVSWDSITLQQWRKAFGVIPQKVFIFSGTFRKNLDPYEQWSDQEIWKVADEVGLRSVIEQFPGKLDFVLVDGGCVLSHGHKQLMCLARSVLSKAKILLLDEPSAHLDPVTYQIIRRTLKQAFADCTVILCEHRIEAMLECQQFLVIEENKVRQYDSIQKLLNERSLFRQAISPSDRVKLFPHRNSSKCKSKPQIAALKEETEEEVQDTRL

SEQ ID NO: 147 - DNA, 152082 bp, Mus musculus
  source 1..152082: mol_type = genomic DNA
aattggaagcaaatgacatcacctcaggtctgagtaaaagggacgagccaaaagcattgacctggtcctggatatccagatgtcgagtccaacctgaatttagccgaacacagacctcattgcctcacggagacatcatgcagaagtcgcctttggagaaagccagctttatctccaaactcttcttcaggtgagagggtactcagcggatctttgcacggacacatgtgcctatgcaggagaagggaatgaatatgggcagactttgggaaaacaggaagagatttttgttgtgtttgttttgttttaaaaggtgtgttgtcattcagtgctttaaaggaaataagcatttttgtacaataaaatgaagctgattgaatagagaacaaaatatacttgcaactgtgaatcagacttgcaacagccaaatatgctacggagcaatagatatatatttttttaatttcctgaaaaaagttatacttcataagtgtacttaatagaacattcctaagattggtctgttattttctccaagaaaagctgaccgcaagtgcagtgcctgtgtaataggtgctctgaaaacatttgttgactgaatttttttaaaagtccaggaattatattgtatttactttttgccgttgtaatattgagtaagtctaacatgctcatcacagttacattattctttttaaaaatgagcaagtcagttaaaatatctaactttaaaaagaaataatataagcaatgcattaaaaaagtgagttaccatggggatatgaaactagagttttagccactgaagctatattcaattgacaattaggacattgttctcttatcctacattgtcaaaaaaccaaaccctcaatctaataggatttttaaattagaatttaagttggaagacctaggcaagaattaagcgctttgtatttgaagtgctccgtggagcttcgtctgctctgatcctgtagtgtgaatgaatgaaaagagcagcgctcatgggtcctcagctgactcacccccccccccccacacacacaccaatgagtcagcacactgaagtatcataagtgtcgaatatgttctcaacctgccctatgctgtgggtagggggcaaggctcagccttagtcttcctgatgttcctttttcagccggtctagagctcaaggctgaggaaagacaagtgcttctgcaggagagctccccccggtggttgggagagaaggaagggctttcttctttagaatgaatatttgtggtgccttttgttacttcatctataaatctagcttatcggtctggatctattttcttattacttacaaaatcagaatgtcacttgacatacatgtgaggcttttatgaaagcctattgaggaacctaaatgtcaatgtgtctgtaaaggcaagttttcaggagaatgaatatctcttgtgtggttttcccactaagtagtaagaaacttcaaaatttttcacttatcaaagtgtttcaaaaatttcccgtttttataacccacctaataaattgtagtgtgctttacaaatgttcttaggctgatttggaaaggaaatgtattataatggctgtgaaatttgttaagaacatactcatttctgccctccaaatgatttcataatcagttgctttaagaataggtgtgtttttaagagtttagttcctactatttataggaactgacatttagctaagtactagtcagtgattataaacttccttctggactttaattttcaaagagtaaaacccttttctccactggactaggcagtgccgcctagtgaccagggcagtgggccctggattcccatggcctggactcaggctgcagatctactgcttagtaggcaagccctttggtgtctctgcatgacttcagtgctacaacttggagtctgtcagtgtgacacataatgtaatgggttagtctgttgaggaatatatgctgtgctttgaggacatgttagctgcccttactgttgtttacatgtttacattcctcgaagtgctgggatcctcactgtaaaggacagtgagtttatttctgctgggtgcacttttgtgactatagcctgtatctatgccatttgcttgagaagttagcataggggatagatagcctcacgtagcatgggcttgttagatacttagatgaaagccatgctcttacatcagatctccttcagtgccttagaatttaacctatcccatcaagcttagggttataaaagactcctaaaagctgacttctatgtgtctactattatggtcttggttttggattatattaattaacattttaattatttagattatgttactgagaaaccaaaacaagtttaataataatttaagtactttttatttttttaagttttcagtaagtaaaaaaatggaaagacattggaattggtctaacacagaagataattttaccatgaaaatttcaagtaattttttttactttcatggaaaataaatgcattaacttgaaggtgtaatgataacatttatgaaataagttgtttcaaaacaagtggtgatatatttatacagaatttatgattgacatattagtggaattaattcctaaaaacctttgatttgtagaaatgtttgaactttacactttcatagagatttaagaaaaaagattatgcctaacgtgtacctgttagtgtgtgtgtgtgtgtgtatgtgcgcgtatgcatgtttgtatgaccatagagtgcagtataagctatcatctcttgagtcatgtctctcattggcctgaatctcaccagttatgttagacagacttgccagtgaacccaagggctttccctgactctaccttctcagcactgggattacaatcttgtgtcactctgcccgccttttcacctaggagcttgggattgagctcggttcttcattcatgtgaagttcttctctgactgggttatgaacagtcccaagaaattgggtagcaacatttccattctgtttgtgatccatattacagagattatacttgacaaaacttaaggttatccaaatctgaaggccacttttgatatactgaggatatggtatttagaaaaccaagaattgctgtcccttcagttgatggatgtcatacagtggccacagctccagatttcatttggcttttctttaatagaaatgggaagaagccacatctaggatggagagaccctctgtttggacagtgtacaagcactgcccgatactggctctgtgccagcaacttaggactcccttctgtttattttcttttcactgataatgtttggttgttacacagctcagaaatttcaacttgggatttatgttaggttcatgtcagttttgtttagtttaatcaacagttctaagagcacctcttgtacaggacatgatgaaatcatgattttgtgtatgtgcatatatatgtgtataataaatatctctatacagtgaaatttattttagttgatatcacaattattaaaatttattttaaggttttatagcacattactacacaatatattttgatagtcaattcctcagagcagaggaagctattatcttaaaaataacttcttcaacattttgtttgatatacgatgaaatactactcagtgcacactgatatacaagggaaatcaaggctttttgttttctttatggaagtttgacttaactgtgataattcctaagtgttaaaacatgtttaagaggtccacaaataaatatcaccataaagtatgttattactgttaatgccctttcataggaacctgtaatttcactgcggtagcactatagataagtataggattgccaaaccataagggaagggcggtaaccatttagcatgcagtgagatattatttgttgagactttaaaaacacatctgagtcagcagagtttgggccgttttgatttgctcttcaccatgcatcttgtgcatttcctcagagccaagtctgcaaagcagtgagtataagaggcgaaaactatgaaagaggtccacttatttggagatactaacagagggatttcataaatacatttttcatcatcagtaagggaaacattttaatggcttcccttcagctcttaagaatggaatggatgcaccatgtagggttttctttgtaaaatcagcattacaaagtggcctcttcatggacttgattgtcagagaacttaggcttttagcaagaatactctagtagttcagatgaggcttgtcaaaatgtcaatttcagtataagccattaattatcttttgacattaatgactatttgaaattgtaaactacttttgtgtttagtattcacatcatttcatgactccaggattacatgattataatacctgtttcttgttgaaattgtctcacaatgctaaacatcatctatatgcagtatacatacatactctaccctcaaaataatgggacaatcattttgatacaatgggtgaggggaaacaactgttgacacattttttaatagagtaagtattccttcacattttccttgtgatgtttatcatataaactcttcagaaggcagtctactttatgactccttgttctagggcagtagttctcaacctgtgtgtttcaagggttaaatgacccttacacatgtgttgcatataagctatcctacatatcagctcttcaccatacaatgaataacaatagaagaattagactcatgaagtagcaacaaaaattatcttataatttggattcaccataacatgagaaactgtattaaagagttccagcaatagaaaggttgaggaccactgcgctagggtaagggaatggtttggagatttttgaagtctttagcattgttagacttcttagcttggaagatattctcttgatatcataagattagctgtcctccccacccaagtcaaaggggtatttccccagtatttcctgtaggtcatgatgactcagagcaatgtttggagggcaatttcattcactcccttttcaccaccaccgtactccatgcttggcattaaggtggtagaggcgctgccctctgaatgaatgaataccttaaaactgatgatctcaagccacagagatccctatcccatactcatggctgtctagcaaggtttgatagagaagtgttgtataggaactgcaagaacaagtgagagaacagcagtggttcagagaaggtctggagtctgtcctgaaagcatgtgacagaacttgggaggtagatctggaaactagcaagggctagacccctgggtaccttatatatttcttagggctttattgcactgctcatgaaatgaaaggtgggaaattttaagcaggcagagatgtgattatttcaagattgttggcgtttttttttttgtttttttgtttttttgttttttttaaagactgacagaagggatagagaaagatgcctgaaagatgtttgggaagcaaaataatcatatttttaaattagaggtggaaggtgagagtgaggaaaaaataagagggcttggatgggtcagtttgggtggtagaatggtaggtgatacatactatgaagtggggtccttctattagaggcagaggcctggtgtgaggttagatgcctatgcaagactgcagtctctaaaagaaagtgcaactggcttgaggtgggttatacagtttgaatgaattctttgtcttgtcaatactgtttttcaacaaataataattagtcagaactaatattttatttggtagtgctaggcaccaaacccagacccatgtctatattaaagcattctcctactaaactgcaccccagccccaagtaattacttcttagcagagaaattcctagcacttagttcagacagatttgccaactaacatttgcttttctactccattacacctgacatttaatagtcactgttttctttacataaaaatattggtctctccctctctctgtctctctgtctctctgtctctgtctctgtctgtctgtctgtctctctctctctttctctttctctctctctctctctctcacacacacacacacaattaaaagccatcatggatcagtgtcagtgatcgagtaagacattaggtattcccataattcagtgcatcaagtacataattacaatgagacctaaaaaattattcactcttttaagagtttatagacctgttgaatttaagagtccgagatagcaatcccaatagcagggccaaggatttttgcaacagaatttgatgaaccagataggcactataagatgagttcattatggtgaggataataaccttgaaatataaatgtgactttttagtgatgtgttaattatttatttatgcaagcctgtgtatgcgcatttatttatcattactagtgagcctctatacttaccaggtttctaacagttaacagtcttagactctatataagaatttattaaaaattctgtttattctgcctaaagtttcattgtattatttttaataacgcaacctttttttctttgtaataagatggctatcacattcatttataggttctgtaattatattacttagtttaattagactaggcattaattttgattcataaaatcattgactgtttaaagtagttgatatataataaaatattacagttaaaaatggactttcttgaaaacaaaaattattgaatatttaaaaaaattaatgaaatctttcacctgtgttgttagcaaaatgtaacttcatttagaaatgtgtaatgtgttagtagtcctttactcagccggcccatggattccctggagtatgaaactgctgacttgttggcacaggtgtcatcggagccttgagagccaggtgctttgctgccacagaaggggagcagaagcagtctcttgtggttcactctccttttgtcaccattgtgaccactgcttctgcagagtgacatcagacacagtccagtggatttacaactcattagtaaagcagtatgtcagggctctgcacttaatggaaacttgttcagggttagtggtgtggtaagatggaacccagctgtaagttgtaatattttattatgtatcaactactttacatagtcagtgattttataaatcaaaattaaaacaggatgaggagattcttgaaattagaaccttctacttcacaaacaacagccatttctatagcttttctttactctgacaaatactaagtatctatataggttctctgtggaatatagcacacacataaaatggaaaatatattaaatatgccaagtcctagatcccatgtgtacctgttaattaaatttatgggaaagaacaacttctatgatctcctttaacaaatgctaaggtaattcttctttttgctaacatctaaaatcatcaactcaacgataaaacaggtttggataacccaacaggtcttcattgggctaacatcctcctcctcctcctcctccccctcttcctcctcctcctcctcttcagtaaattaacaataaagacacaaaaataggtcaactcggaattctgtagttttgcctctatcttccagcccttattaagtacactcaagagattacatacattatctcagtgaagtttttaatctgtctttgataattgcacatataagaaatgtggttttaggggactgcagtttagcagccaccaagctaagagatgtgatgtcagatgtatctttagattggtgtaaatccagacataaaattttaatcaatacatcacacacctagaatagaattgatcaattatttcacatggctttatatatactttaatgttttttcttgggtctgaaataattttttactgcatttgtttatagacaacattaaacaggccatcagttagtcttcttggaagggcttgttgctttaacaacaacaaagaattactttattttatgtgtacagtagtttttccagcttgtttgtttgtgcacattctgccagtggaagccagaagagggtgctgaatagactggagttgcaggtagtggagagacatctgaagatgctgaaaactgaggtgagggcctctggaagagcagctcttaagcccatctcttctctgagccatctcttcagcccatttattcagtctgtttcttagcataggtctttatgacatccacaggaggcaggatggaactttcctaaaaataacaatatccttatagtttactttcagtattatttgaaaacaaaacaaaacaaaacaataaaaacagacaatatagcaggccagaaaacgtggcagtagctaaacattgtcacagtaacagctcagttacagtgagtgtgattccagctgtgcttcctgtcctgaataaggtagctaagtactaggcagtgccttttactcagccccactttcctactttccattttctctctaggataccaagctgggactttgagttttcacctcctaaccctacttcccttcactctctaagcacatcacagccatctttggcatctatgccagcattaccacccagtacttgttctcatcattcatgtcatctgatttttctattggtctttcttcttatccacctgctaaggttgcaggaagtggtagagacacctgatagatggttcttcaattttatacttgtcactttatatatacaaatttcagattttcttcatatggtagtatctatagttcttttagaaagtgcttttatcagtaagtcttcatggaatttaaatacttcatgaaatttctagtgtaaacatgtatgtatggcaataaaagaattgcttttccacaaacaaaaagatataaagtcccaaataaaagcaaaacatttatataatattttaagcattattttcttgattcccttttctgtgttttacacaattatatacttctgaaattgaattgtcttataattgatttttttcccaaacttctttctggccatcagatccaggaataaattattatcaacacataaaagttgcatatttcctgtatcctgtgacttcaagtgattttttttttttacttttggcattaatttcacccaacaatgttgacttttaactttgattgcttgatattccttgagaaagagtactttatgatccagttttggaagtatcaggtaatgtgtacttggatgcttgtctggcatgctaggcattgtaattacagtagacattcaccaagtttagtactctaccttaacttgaaattgtacacctgtcccagaggtgaaggggttctgaaggcagatttacactataaacctattcatagattctaaagggcaagagtgattcagaaaactaatttttacttgagtatgaaaatggcttaggctaaaactttaattatggttccaaaagtaataagtacttatataaatgattatataattttaatttctaaaaacagtatgtcatgtacattttgacagtggaagtgttggtttaatagtgaatctcataatcagtgtcaccttagaatgaacataaccactttattttaaaaacatgataatgtcacctatggtttgtcacttatcacttcctaggggttttgttgccctgggttatgctgtgatcttgtgtcaacaggtgtactgcaggcatgctaggctgttaactgagtttggctcatatgtcctatagggacatgctcacttatgcactgtagagataacagtaaatatcacagtaagtttcaatattcaccaaaaaagaaatgtccggtgaagttttcctatttgtaggactattatgggactaaaattatcatatatttaagaatatgtaattttttattccttttattcctaaaaaaaaaaaatgaaaccaactcagtcactttaaaagatatacatttcagatcaaaattttgtggggtgtgtctggagagtggcagatattaggattcaagatttcaaagacattgaaggtagattatgcttatcttgattgtgcctggcaatttttgagtcccatgcttcatctccccatgcttttagaaaagtctcacatttagcttctctgtcagttcttaggaaccagcgtgtagcggaagaaatgtgcactttggaatcaggcttagctggagtcctcattctgtgacttattaacgtgtgttcttaggcacttaatctttctgatactcaattattctcactgggataatgagttactttcatttcaacctggcctaagaatataataatattcaatattctctgagtacttactctgtatattagagttctcctgagaataagaatcaatagtaaatctatttaatatataagattatttataaagaattagcttccgtgactaagaaaactgtcaagttcaatacttgcagggttgttttcaaagtggagactgggaaagctaatattcaggtttgagttcaaaagcagtcgccaggagttcggtgtcatttggggaggctggtctttttttttgtcagactcatgttttcagtggattagggaagacagcttacattagagagcatgtagtggtgcacagacatctggcttcccttgtgatttccggaacagaattaacacaaataatagaacaatccataacaggagctcaacctgctctaacctaaatgctctcatttaatgttagtctgacctccaagtatcttatcaattgccatagccatcacccctgtgaggactttctgtgtcttcagtgataagtagtgcaagatacagaatgcctctttaataagtaaatggtaacagtcttatgaacactaaggcacttaacacctttccagtgtgtaacagactagctcgctctttcctacatctaacattcctctcctagaaagtaggcacaacatgtcactgaattataattctctttcccaaaatcccttgcccagtctacaagttttgtttaccatagactttcatcctcaattgtgtgtgtgtgtgttcattgctgggtttgaactcctgggtaaatgcagcatactaagcaaatgctctgaggcactgagttacacttccaaccctcatcttaaattttaagtttattttaagcattcaggctactctttttgctccgacatatttcctttctgtttggggcccatgtgtttgcagaggctgctatcacatagtatataaactgaatggattagacactcaaaatttatcgttatagttctaaatgctacaaggctgacatcaaggtgttagttaattgttttttcccaaggatgtgagtgagaatctattctgtgctttctggcctagcgtttgtcagcatgctggtggggatccttagcattttgagatctgtagaggtatcacctccagaggcacccttttcacagatttctccttgtatcttcagataaatgtccaaaatcaattcctttgtaaggaaaacagtcatgttgtctggaacctactaaatgtgtttactccacatgttttgagggtcataggttagagggggtgggtgggtggatgagcaccttcatagaagcagggggaggaggatgggatagggggtttccagcagggaaaccaggaaaggggctaacatttaaaatgtaaataaataatatatccaataaaaaagtaaatacatatatatccttaaaaatatggagacactacagaggacactgtaagacgggataagggaactatctagggagtagttcatgaatctttagtatatctttagtatatctgtactaaaacattaatgaagatcaaatattgagaaggtttagataatgaaaaatatttcataaaattttattcaacaaaattaaataaattcttggttgaatatttagtattgtgggccattaatgatatgtaaaatgaacatgttatctctgaccaagtacaaatcctcaatgtttatattacattcttgtagagttggtttttcttttctcctttcggtgccttgaccagaagtaatgaataagcaaaacgtccttgcaatcagtgtccttagggtgccataaacatactatgtttgtggaattaattactaacagatcaattcaccaagtttctaatttgctcagtgcaatgaacaggacaatgaacataggaagataaattatacactatgttgtccttatgaatttaatcttgtgaggaaaaataagcagagtgaaatatcttaacttttaaattcaaaaatttaaaatattaagtgagaattatgtgccatgttcagtggacagtgcagagtagacagtgcagcttaaacagagctctttatgcaatgtggtatacagtttagtgtacttggggacctgtggttgataaagggaggaatagagaaaggtggggtagggtaggacagtgtacacaggagactgattaaccagactggagagagagaggctcttcctgaccaatatcaatgcactaaaccttcttagaaatagaagtcaggctttgtttcaaggaagctgtcagtttttattcagtgtaactcagcaaaatcagagattagcttgctcagtgatggtgataggaaaatctttttaaatattaagagccaccctattatcagtgttttcatccagttgaactcctgcagagttcaaaagctggagagtctggctcaatgtttcctttaaagttcattttcttaaaacctaaatggaaacaaaagatcatgacatcttgaggaaaaaaggaaaacaaaacctttaaatagttataaaaataatttttattaatctaccatggtttgtgttaggagctatccttttaagtacctgattgctaagatggctaacttgatctcttaaattgcttattagaaacaatgaattaatcactattatttatatatgttatagtcttgaaaaaatcagcaattttaatttttgacagatcttaaaaggtttgtattaacatgcattgctatgcttaaatgaacataaaaatattaagtagagacttaaagtaaggccttggagtagttttctttcatggcaaatcctggactaatctggtcaacaactccattccctgctgaatctcaattttccaaaggaatacgtggtgagaaagggtgaggacgagcctctgttttcctctcctgcagctctggggagcttcagtgtttgttcttagtgatgccaaggtttttggacaatgcaaatagaaatacttcgcctcccaaattcaggaacaggatatgaaccttatagtccgagtcatgaactgtgcctacttacatcctcctcagcactaaaagggaaaaggcataaagatttgaaacttccatttcaatttgttgcataatagaaggtaaaaaggattaaaatgacattaataaacaaatttcatatttaactgggaggtaggaaaatatccacagatgagaagcccaaatcaaatgccacaccactcttctaatcccactggggattcacagtgggtatcagtgccttaaaagtggcatcatacttaaacaaacttggggaagaggaggttaagacaatgaggaaaatttcagactgacttatcagactagttgattgcatggagaactatggaaactatgtttaccacaaactgaagtttaaccttgtcttcctggtaccaaattacttcttctagaaaacattaacattcttattgtgtatacatggaatgtgttttgattaaatcctcctcctatctctttccctctcatatatcctcttcttcctactacttttgcctcccaacttcatgtgctcttatttatttaaatttaatacccactgaagccattcagtactgccttatatgactatatgtgcatggagaccatctactaaacatacgtatccaccctttcaggaatgggcatccctgaatactgattctcccttccccagcagctacggattcccaataacttctcagatagagctaagacttcatgagtcccttcctagtccatgctggggttttgactggcttaatcctgttactattttcatttaaaaaatgatatagatgcctctaatctctgctgtatcattttatctgccaagcaaatctatcaaatgagaaaatgatctcaaatgatgtgggcagatgcattttaaaattacatttgtgtctttgtgtgtgtgtgtgcacatatacacatgcacacacacactgctgtgtactaatgtatggaggtcagaggacaacttgtaagtcagtcctctctttctaccatatagtttctatgtgttgagcttaggtcatcaaacttgacaccaactacctcctaagccatctgctggtcctggaatatatagaagtcattttgatgtaatgaatgacaaacatctatcaaaagacaaaaagaacttctttgtacacatagtgaggagctattaaatgatttagatattgaagatcacgagaagttgtactttgtgttttatgtgccatggctcatgccagatgatatctgtaggaatctaccacctgtccagaacctcatagaagttctttgtctctaagaaataattatgttctttatacatttggggaaaaccttggagagtcaagtaggtatgcttccaaatatttagtcactgtcagaatgacagtcatggctcagtaaaggacatgcttatttccgtgataaatgaaaagtattgaatttgggtctttgtgatgccatctgataaagcaaaatgaacaaagaaccacaataaaggatacaaagttctagagaaggggagaaaacactgaaataaatcgaataattatttttaaaaaagcagcaaggaaatgcgtatctcccatataggagatgtcatgaatgccacttgtgcacagtcaagtctttcagttgcctagtcagaagccgggaggagcttatgcccatcttccactttcacacttccgtgaggatgcggtgagagtgcttctgacctctgtgttccaggagatgattcaacactgcacagagggtcagttccctgatagcacagaggtttccatctgaaagcttgcacacatgcctgtccataactcaggagcattgctacggtaaaactgcaacaccaggctgtttcctgtcttccttgttcttttggtttcaaatatatttcttattgatgatgaaaatatcgctcagtaatttgaaagccattgtttcctcagaagtctcctaaaaggaaactcgcatgtaggaaataggcagcttcatggggcaattagtactattttcttggatttggtgtaggtacagtgatatctgtagcttcacagaaaggcacttaggctgctttttcagaggacattggtacttgacagtaaatgacatcctttgtgtcttatgttacctcctaagatgagcaggattcctcccctcccttcccttcctctcccttcccctcctctcccctctgacctcccttccaacctcctctcccctcctctcccctcccctcccctcccctcccctcccctccttttccctccccccttccctcctcttcccttccctttcctatttccttttctatttttttcttgtagcgttgcttgttgtctttagattttagaaatgctcgtgtcctctcactgccaacaaacacttcttcatttctatacaatatgatatcacaatgccattttttcccctcagaattcatagtagttccaaaatctaagtttctggctttgagagaccggaaataaacaatgtataacattcatgttgcttgtcatcaaccgttaactggtcccatgagttttttacacactgtgatatcattgtcaggagccatcagaacaactgcgtatgtgaaaaggattagagtttgaaaatcaccactggaaagtttcaccagttctacaagcatatctatctcacttagaaaacccttccagcaccaacgttgatttctcaacccttcacactgcttttctaacttatagctttattgaggtagaatttacacatcaaacactttacccatttacaatatacaaaataatgaattttaagcatatttataattttgttaaatatcacaaaataaatgtaggaacctttattcatacaaagaaagaaagaaagaaagaaagaaagaaagaaagaaagaaagaaagaaagaaaactattcagctttctcatgcctatctgcagatctgtttcaagggccttgtgtacttgaagcagatagagccacctgggaagagcctacactgagaaactggcttcatcagactagcccagaagcaaggtcattggttttatttatttatttatttatttatttatttagtggtttttgtttgtttgtttgtttgattaatgattcatgtggaagaagcaagcccactgtagacaatgccattcattagtaggtgaccttacaatatataagaaaggaaatcctataagccatagagaacaaacccataaacatactcctccttaggtcctctgcttcgattcctgtctttaggttgctgtttaagttagttactgccctgacttccattcatgataaattgtgatgcacaagtgtaagcttttcttcctcaagttgcttttggtcagtgtcttaacacagtagcagagaaacaagctctatattttgcctcccacttcttgttctaggcaactgttagtctacttctgcctttatcttgttgcttcataaaaatgaaacaattcagtgttttgtgactggtcttgttcaatggttcaaaaagttgacactattattacatggttcatcacttggtttagggatatatatgttgttaagtttttacttgacagttaatgttttttaaccatttgcctgttgtaaatgatactcatatgaatatcatttgggtattagtttttatgtagatgtatgtttttatcctttggggtatatacctaagagtggaatgggtaagtcatgctgtaaatttatgcttaatattttaaatatcttactgattattttccaaaatatatacacaaatttatattcctctagcagaacacagggttacaattttccatacatttgcaacgatttgtatgtttagtttgttgttattacagcgattctaatgggtataaaatggaatctagctgtagttttgaattgcattttcctactttgtaatgaccatttcatgtgcttactggtcatttatgtaatttctattttagataaatttttatccagctcatgtaattttaaattttggtttatgtctattactgagttagaagtcttttatatatctgatattaaaaccacttagcagatatttgacttgcagaaattatatagactatacactattttctttattgtatattttaaaggataagaagttttattcattttatccattttggttattgttgtttatgcttctggtattatatttaattatgtgctactttttcaaattaattatgaaatatggcaaattagacaaataagctttgatattacatgcctatttttaaattctaacttcacattaacaaattgcttaagcatcactagatccagtttcatatctataacatggatatgtaaggtctgtgcccagagctggtccagtgccacagtgctctgtacccaaatactgtccggagagagctggtctcccaggagtgccaacacacatgtgaacacaggtaagaccaccacttttgattaaattcctggcccaaaagggtctcgcccagagccatcaggacacaggaaccaaggaacagctggggacaggatccttcagtttctgtctgtattctggagcttaccttgtgccacagctctccataaccaaattactccaggagggaactcccaggagtacagacacacaggtttgaaggagggacaagccacagtcagagacaggaaggccagctaacagcagagatatcaagatggcaagaggcaagggcaagaacataagcaacagaaaccaaggctacttggcatcatcagaaaccagttctcccaccacagctatccctggatactccaacaaaccagaaaagtaagactctgaattaaaatcatatctcatgatgatgataagcgatgttaagaaggatataaataactctgtaaagaagtacaggggaaaacaggttaacagctagaagccttaaagaggaaacacaaaaattccttaaagaattacagaaaaacacaaacaggtcaaggaattgaacaaaaccttccaggatctaaaaatggaaatagaaataataaagaaatcacaaagggagaccagcctggagatagaaaacctaggaaaaagatcaggagttagatgcaagcatcaccaacagaacacaagagacagaaaagagaatctcaggtgcagaagataccagagaaaacattgacacaacagtcaaagaaaatgcaaaatataaaaatctaacccaaaacatccaggaaatccaggacacaatgagaagaacaaacctaagaataataggtgtagaagaaagtgaagaatcccaacttaagggccagtaaatatcttcaacaaaattatagaaggaaacttccctaacctaaaggaagagatacccataagcatacaagaagcctacagaactccaaatatattagatcagaaaagaaattcctcccatcacataatagtcaaaacaccaaatgcacaaaacaaagaaagaatattaaaagcagtaagggaaaaaggtcaagtaacatatacaggctgatctatcagaattacaccagacttctcaccagagactatgaaatctagaagattctgggcagatgttatacagagcctaagagaacgcaaatgccagcccaggttactatacccaacaaaactctcatttaccatagatggagaaaccaagatattccatgacaaaaataaacttacacaatctctctccacaaatccagtactataaagggtaatagatggaaaactccaacacaaggagggaaactacaccgtagaaaaagcatgaaagtaatcttctttcaacagatccaaaagaggatccacacaatcataaaaataatataaagaataacaggaagcaacaatcactattctttagtatctcttaacatcaatggactcagtttcccaataaaaagacatagaataacagactggatacatacacagaacccagcattttgctgcatacaggaaacccacatcagagacaaagacagaaattacctcagagtaaagggctgaaaccaattttccaagcaaatggtcccaagaaacaagctggagtagccattctaatattaaataagatcaactttcagcaaatagttatcaaaaagaataaggaaggacaccccatatgcatcaaaggaaaaatcaaccaagaagatctctccattctgaacatctatgctccaaatgcaagggcacccacattcataaaagaaactttgtactacagctcaaagtactcattgcaccccacacattaatagtgggagacttcaacaacctgctctcagcaatggacagatcatgggaacagaaactaaacagagacacagtgaaactaacagaagttatgaaccaaatggatctaacagatatctatagaacatttcaccctaaaacaaaagaatatactttcttctcagcacctcgtggtactgtctccaaaactgaccatataattggtcacaaaacaggcctcaacatatacaagaagagtgaaataatcctgtgcatcctatcagattttcaacagcaacaaaaataacagaaaacccacatccaaatggaatctgaatgttctagtcaatgataacttggtcaaggaagaagtaaagaaaaaaaaattaaagactttttagagtgtaatgaaaatgaaggcacaacatacccaaacttatgggacacagtgaaagcagtgctaagagaaaaactcagcccccagtcccttttaaaagaaactggagagagcatacactagcggcttgacagcacacctgaaagctctagaacaaaaagaagcaaacacacccaagaggagtagacggcaggaaataatcaaactcagggctgaaatcaaccaagtagaaacaaaaagaactatacaaagaacaaaatcaggagctggttctttgaaaaaaaatcaacaatatagatgaactcttagccagactaaccagatgtcgcagagacagcatccaaattaacaaaatcagaaatgaaaagtgatataaaaaactgaaactgaggaaattaaaaaaaatcagatcctactacaaaagcctatattcaactatactggaaaatatggatgaaatggataattttctagagagatgctaaatacctaaattaaatcaggatcagataaaccatctaaatagtcccataacccctaaagaaatagaagcagccattaaaagtttctcaacagaaagaagcctaggaccagatgggtttagtgcagaattctatcagaccttcaaagaagacctaataacaatactcttcaaactgttccacaaaatagaaacagaaggaacactacccaattcattctatgaagccacagttatactcccttggagatggaatggtttctgtctaatcaggaaccggtcacaatttcataagactataaggacttcataagagattttttccatttttatcatatttaatgttacaaatagatttttttaagactggctgagtgcatattacttttagcttcagatgatatcgtgtatatttaagaggcattttgcaattatagattattttgatgacttaaaaatgtcaataccgagttgtaaatattaaaataaattcctacccccacagtgacacacctacttcaacaaggccatacccctagtcactgctcatctccttaattggcttatttggacaggtggctgagccttgtatttagcaattgtggagcagggacttccaccctcaatctctggcaacacatcatttcattattagaaatgagatgtcatcctataaaaaattagagttttcacaaagaaatggaatgaactaagctaaacagtcgggttaatatgtgcttgtttaaaaactaaaatactagcatttttcataataaaatctgaagcttttcatggttaagtgaacagaacagtatatcgaagatactaggttttttttttttttcctgtgaatgttagtgaactcttaaaaatacacacgagtctgctaacttatagttgattagctagtttctgttagaagtagccaaaattttggagaccactatatttttgaggaataccattttataagtccattgagtatatacatggctgggcatgaatcaagatgcataaagtcacttggatatgaggtgaagagctatcagggataatggaaagacagaaaaggagatcctcaatgcattgcctcccgttgttccaagcgaaccaccgagactcatgaaatgcctgactgactataaattccttgcctgaacattactgaatttacacaagttcactgaatataatcagaatcactgaaaagaagaatggcttgaatttcatatcattattgcaaagtgtctaaaacttgaatgcctgtcttttaattttttaatttttttttacttttgttttatatttcttagactgacctgcagttgacagagagaactcactggtaggagacatttggtttgatttattggtttaatctcaagatataaaatctttctcgaagatgactctctggtgattgcatagagctaatagattttagtttttaaaaattctttttagacttataaagtatatgatgagtgttttgcctgtatgtaaatatgtgtactgcacatgcgcttggagccctcagaggtcaaaacaagacatctgatcccctggccctggagtcccagatgtgagtcaccatgtcggtgctgagaatcaaaccctggttctctgtaagagcagcaaatgctctaaaccactgatcatccctcctgtccctatattttagtttttataatttactttgaaccagtttcaacttgggagcataaatataggttcattttattgtaacttccaaaaagaaatgctaactaataataaaatacaggtggtgagctgtgtgatgtgtgggtatattatatcaccgaattttattttgccttcagtcgttgatctaaggttctcttgttaaaactagatgtcactgtataacataatatcttaaaaattctgagatagcaaagaaggtttttataaaagcatctcacacattgtgttactttgaaatgagctggaagctcatttatggggatggccactatattttatacatgagccaaaagaatcatagttatattttttcaaggggataagatgatttcaaatttgcctctaaatgctttttgaggcatgggtttggaggacagtaaaattctacttacttaaaaggtgatgtgtccaagaaaatcaagaagaaggaagaccaacgcatgcatacttcattcctccttagggaacaaaatacccatggaaggagttaacagagacaatgtttggaactgaaacaaaaggatggaccatccagagactgcctcaccctgggatccatcccataatcagccaccaaacgcagacactattgcatatgccagcaagatttttgtggaaaagaccctgatatagctgtctcttgtgaggctataccagtttctggcaaatacagaagtggatgctcattgccatctattggatggaacacagggcccccaatggaggaactagagaaattacccaagagctgaaggggtctgcaaccctataggtgaacaacaatatgaactaaccagtacccccagagcttgtgtctctatctgcatatgtatcagaagatggcctagtcggccatcaatgggaaaagaggctccttggtcttgcaaactttatatgcctcagtatgggggaatgccagggccaagaagtgggagtgggtgggtagaggagcagggcagggggagggtataggggactttcatgatagcatttgaaatgtaaatgaagaatatatctaataaaaattgaaaaataacataaaatgtgatgtgtcattttaatattttcaaatctattgcgagcacaaggcttctggtaggtggaattcatctttaaactgtgttctaaggaccaccatccttcctgtcccatcccatcagccgtctgagatttccaatctcggccagtcgtcaacacacgtgaatctttctagctgaattgaactgtgaactagctgctaagcacagccgtttttaaatttcagattgtagaacctaaattatgatatggtaaacaaaggttaaagaggttgtcactttgcatttattttgtaccttgctgttatggtattaagggcatttgtgcttgctgtctctgaggaggtaggcatactactattttatgcaggttagtcctcttcccagttctcatctgtagtagctagaagctgatcatggaaagagtccttataaagcagtgactgctgaaggtcatgagtcaggtttgcttttgttttctggaaaggggtttattatttgtttacagatcacacccccaccctcagcctagtagttttcagttcccttactttaatctaagtttgtgtcttattttaatacaactcactctacctacttttgtaaagctgaacatggttaaatgaattcagaagaatgtgaagaaatctttgatgttagtaattcagaaaagttttgtgcctctgagtaccatttcctaaccctggtaataaagcaacagcccttttgtcctgtttgcctaacaggaacttaagatgcaaataaagtgctaatggtgtggaatttctttggcaattgctaaatagatactttaaaaaaattgtagtaaactcttgctttaagtttatggagaataatagcccaaatcacaacatcccacaaggccatcttccttttacctcctatacttattgccagatacttttcagtgtcactttccttctgtgagatgctgggcaataagtacctagctgtagaactaactttctttctttctttctttctttctttctttctttctttctttctttctttctttctttctttatttcttccttccttccttccttccttccttccttccttccttcctttctctctctctctctctctctctctctttctttcttctttctaaatttattagatattttctttttccttccttccttccttccttccttccttccttccttccttccttccttcctttctttctttctttctttctttctttctttctttctttctttctttcttaattttttattagatattttcttcatttacatttaaaatgctatccccaaagtcccctataccctccccctgccctgctctccaacccacccactcttgcttcctggccctggaaatcccctgtactggggcatatgctcttcccaagaccaagggcctctcctcccattgatggctgactaggccatcctctgctacatatgcaactagagacatagctctagggggtactggttagttcatattgttgttccacctatagggttgcaaacccctttagctccttgggtactttctctagttccttcattaggggccctgtgttccatccaatagctgactgtgagcatccacttctgtatttgccaggcactggcatagcctcacaacggagagctatatcagggtcctgtcagcaaaaattcttaggcaaatggatcgatctggtggatatcatcctgagtgaggtaacctaatcacaaaagaacatacatgatatgcactcactgataatctggtattagcccagaaacctaggatattcaagatacaatttgcaaaacacgtgtagtaccctttcttagatgatgccactagaggcactacaccattgtggcaccattttcctcatgcatccagaccactttcataaatattcactactttttccctctcacaaaatgaccagtgaatcacagtgagctgtgaagatatctagttaacctttgtcaaagaaggcttttgttaaagtgtaagctttcaagttaaagggagaaagtgacacactaaaccatagtcaatcactaatgtcttagcaaggaatagataataagtttacttagtcttatggattgacctaaatttagattagccttaaaggcaacttacagaacaattaaggacatagggctggtgctagtgatcaagccagagatggaagtagtgtaaagaatatggacccttataagggagggaggagggtaatcatgaaggccacctggaacattgtgtcctagagaggtatcaaaatgttgacatttggcaagacatttctttgctctctcaaatgactttgatagtgtcttagttagggttttactgctgtgaacagacaccatgaccaaggcaagtcttataaaaaacaacatttaattggggctggcttacaggttcagaggttcagttcattatcatcaaggtgggagcatggcagtatccaggcagacttggcacagcaggagctgagagttctatgtcttcatctaaaggcgactagtggaagactgacttccaggcaactagggtgagaatcttaaacccacacccacagtgacacacctactccaaccaggtcacacctattccaactaggtcacacctccaaatggtgccacttcctggcccaagaatatacaaaccatcatagatagagtatgtttttctgttacatgtttatcttgcttctcagatactgacttttggtggtttagtgtgcatatttcttcttcttttttttttttttttacatcattaagaagtctcaataacgataaatcttagacatctctgagttacaaaaaggtgctgagggagaaaccagttttgtaaaccactaaatccagatgaatttcttccttaagcaaatacacaaaacgacttgcagtaatcacacatgtctttaatctcagcactctagaggcagaaataggtggatctctatgagttcaaggtcagtatggtttacagagtgagttccaggacagctagggttacacagaaaatactgtctcaaaataacaaaaaatttaagctgagaaatatctcattcttttgaatttattttacaattttctcttgatatatgattgattttttttaaatataattctccttttcttctcagcctgtcttcctctcatatttttcaggcttcctctaatacacacacacacatacatacatacatacatacatacatttccaaaggctaatactttaatacttggtcaccagttggtgaagctctttggggaggattaagaggtgtggccgtgtgtgtgtgtgtgtgtgtgtgtgtgtgttagaatttctgatttttgtcattgtgaaggttatcctgcctgttgccttaatagttaaagcagcatgtttgagcaaatagggctaatctgcttatttcttccatcataaattatatattaaattcctaataaatatctacagtgtaaagagaacagatggtgatgattcatatttccaagcaatgatatagtgataattatatcagctaactggtataagctactcaatgtttatactcactttttaattttttaaaacttttaaaaaattttattctttaatcctttcttacagtccagtctttctctccctctcactcttcccactgaccactccctgtcccctaccttccccttgtctccaagagaatgtcaccatcttccaccccaaacccaacccccactccaccagacctccctggggcctcaagtctctagatactgctggtcttcccatggggccaccctactcctcaggttcctctagcttttccccaattcaaccacaggtttctccagcttccatatattggttgggtcctagtatctgcatccaactctttcaggtgcttgttgggcctttctgagggcagtcgtgctaggttcctgtctgcaagcacaccacagcatcagtaacagtgttatagctaacacattgctgaattgccatgggctacttttaggaaagactacactgtaatagatttcttgtctgttagaactaagcaatggcatcagtttagagatgttagtgtttatgtgggtatatcaactaagatatgaattactgcatttatgtaagttgtcttatttaactttcatctttttgtatgcatacagttggtataagaatcatgtctacattagagacccaaccaagtgaataaatctgtctgccctcttctcttttagctggaccacaccaattttgaggaaagggtacagacaccacttggagttgtcagacatataccaagccccttctgctgattcagctgaccacttgtctgaaaaactagaaaggtatgatcttatcattgactttactggcaaaagaaagatgtttttcatgtcttttaaagaacagaaagctggaatattagaggttccatttaaaagtgatgcatttaaataaaatcgtactcttgatgaatcttgatctactcaagaattaaacaatgaaacaatgaattaaagataataactttcttaagaaatggcctcttctacaaaaatagataatgcatagtctgagaatttctatctagtgttggaattgatgctttttttactctttgtcaagcattcttaacaatgaggtgcattcttagccttggccttttgatacaaaatatcattagtccaggataactctaaactcactatataaccaggatggcctcaaaacctcttcctttttgcattaacctcctaagaactaaaggcatataccaccaagtctggcttttttgaaaatatttttaagttgaagatttttataatgatggtggtctgagtgagaatggcccccataagcttatatattgaatacttggtactgagttggagaggctgtttgggaaggaatgggaagtcttgcctttaaggtttcaaaagcccatgctgttcccaattagctctctctctctctctctctctctctctctctctctctctctctctctctctctcagctgccccaggatcatgcctgcctactgctaaactccccaccatcatgaactctccctctcaaagtataagctcccaataaactaattcttctgtaagttgtctgagtcacagtgtcctggcacaatagtataaaagtaactaaaacaattatattagtcaaaatacataagccagttgaatattcttaaaatagtagtttcttttatgattattataagtaggagtagtttagctttgtgatattaaaacaaaatatatttggaatttttgagatgagaacttatgtattttttctttctaattttggtttattatattgataatttcatgcaagcatatatgtttttgtcaagtccatctttgattccagtctactcaatgcctatctgatcctcccccccctcaccctcccagcttccatgtgctttttaaaaatcacagttagagctaccatatgcggataatataggaccatctactgtgttgtgggttgcctctccagctgcatttctgaaaaccagctctccattaattactagtagctcctcaggtagtagtgggacttcataagcccctctcatccatgctgagattctcttgacatgattgtatacaggtcttgtacatgcagttgcagctgttatgagttcatatgtgctgtcatgttcagcacatactgtatttctgcatgtatccaataactttagctcttaaactcatcctacatccacttctatgatgatccctgaacatataggtatcttatttatagctgaggactccacagtcatgtcttcatatactgatcagttgtagacctcaaaattaattgctatctactgcaaaaagtagcttatctgatgaaggttgaggtatgcacaaatctgtaaatatagataacttaggcagcaggttaatactatgtctatttatcaggataatagtaataggttctcccctgggtaccaagcataactcctatcttgtgaagtgggccttcaatccaatcagaaaaaggttaattacgtgagttgacatcattcatgtctctgtgtcctactcatgggcatgtctttctgaagccagtcttcattatagatggcagtgtttatatgtaagcctgttactttttcctccagtcacatgcatagaattttcagcactatgaccaccggccactatgggtgaagcttactttttgctacctgattgattttttttttttttttttttacattttttggctcaagtatccaattacttgagcagtagggtgtttccatcaaactctggaagcttaccaaaaacattggcaatatgtaaagcctgtaatatttgggggattatgggatcccagtaaccaaaaactctagagagataatcactgcctggcactgggaatttttttattaatttactttatatcctgatcatagcttccccttcctcctcttcttcctcctccctctcaacttaccccctctgttttctacaggatcctgtctgattagatttcccaataagattttttacttggattattgatgttttttcatttccagaatcattttagtttgaaattgtccaacaattctcttaattgaaggttattatcctatcttctaatgacttctttacttcattgatccctttattctttttaatacattcatgcctttttccagatgtttgaatatactcatactttattaggtgctattattgtaggattagtaatctgttgaggaaacatggtatcttgatttttcatgtttatttcctttctatgctgagacttgtacatctcaaatagttgttgagttccctccttctccttttcattcacatcactgcctttcactgaagtcatctacaatggccatgagagtactaggtctcagtagggttgagaatgccatttccatctgtggtgcttttagagggaatgtgggtctgagtagatggcctaagaaagggtagccagctttcctgctacctgtacaaagatacatagttgaggcatctggagcaaaatttatgtgagctgaatgtgtgaatgccattatacttcatgggaaccattatactttatgaatttgaatctttcacatttcaaccataatttctcatctcggccactctggaagaaaaaccgtaattatcttcagcttacagataaacacatcatggcttagagataatgtaatttgccaaccactgaatgatgaataattcagtcctggtgaatttatcatagttcccttttctgactattggttggggccattgtgattgtgagtgacagaagcctaatcaactaggttcatcaattaagaagaggacatttaatagctcacaaagcctaaagtatgtgagtgtctagatagatgactagcctgagggctcagtgggtccaatatatctgcactcaaatttctacttgtgatattttccctctgttggcttattttcttagattagttttctcctcaggttgacctctcagaactctatgcttatacctgtctgctccacagaagataataagcctcccttcccttcctttccccttccccttcccccttctctccttccctccttccctccttccctccatccttccttccttccttcctctctgctttttatttcatcaccaaatttatagaattatttagacttagttttatgtcccctattctgatagagtttttaaaatttatctattgtgttttaattcaaacactgtctcagactggatacataagttctagtaagaaataaattctaacctatattgtctttgatacaattttgtatctctttatcttatttcttatatatttatgaaaaccactcctttacccacttggggagtgactgaagttctcagtctgtggctgagatccattgattgactcatctgcttcaattttgtgaccatgagattgaatctgcagtgtgaaaaccatgagcccactctgtgttcctaactaacttatgagctttgccagtctggaactcttttccctcattaagtttctttactgtgttgctggattaataccatctacttttattgataattgctctagagctacagatttttcaagtcctatgattaaaaataacagcttcttttcccctcaagtctatatgtcttccatttcatagctgacaattctttgctgttctcgtttccacttgtttatcattcatttatatatcaatgcctgaaatatggtttctcatcagactatgttcctcaaactgcatagatgagggataacagtgacctgttactgtcaaatgtgacactttttttttgtatttactatcctactgttattggtatcttcatcttgaaaccatttctttgatttatggacattctctcctctgcatttcctagatcattaaattataagtgaagtattgatgaaaatttttaacgagacctattgtgtggagattatactgctactatgtattttagtgccttattttttttattaaatttatttacttattccctttacaactcaatatcagcccttcctctcctcccagtaccccctgacacaagttctcctccattactcttctgaatgggaagcccccctttgggtgtccacccctccactctagcatatcaagtcactgtgggactaggtgactaggtatatcctctcccacttagactctctaaatattacagatggagaaactggctctctgtttgtgaataaagagtagaagagaaccataggttgactaggctttatagatcagctgccgttagcatgtttcttagggaagtcatggtccatgtagtgcgacttccaagcttttcattaatatcagttgtatgctcttcctatcaagtgagataggaccatatttagttatgctaacttaatgataatgagaatagccattaaagaaatccaaggcctttatctgatcattcagttctggtctgtggtttatggaattttttttcatctcaggataatttgaaaattgagatgaaagtgagactgagacatattttattccattacaaaaattgtaaatagttttttttttaaataaaaagcagtggtagtactgaaataaaactttttcaatactatttagtacctatccttactataaaacatatttttattttgctctattttcaaagagttagatactattaaatgaattcagtagttggatatgaagtttaatgatggttctctcattgtttttctttaaaactccaaatgggtttttcttgtgttaaatcacaaaatgttcccctttcattagaatgtctgttggtattgtcattgttcaggtctcttttaggcaaccaggttgtattatggctgtcacttcactgtcatttctaagagacatatcttaagtagactttctggccttctggctcttacagtgcttcagccccttctttcaagagccccacttctaaacaaagaactatagacaactgagagagaaatgtttttttctagaggtgagctccctaattagttatcaaatgccaaggagtcatccctgaatcatatttatacaagcagcactaaaaggactcaccaggttgtttgtatgtatgtatttatgtatgtaaatattttaaaataataatagatattataatcaaagacatgaggctatgaatttgagaaggaatgtggaagagggacaggggaggggctgaagggaagagacataggaggggctagaacgtgaacaatgaaagagaaaatgatgcaaattatagtagttaaaattaaaatatatatatttaaaacaaaaaattcacctgatattttgttgtttgaaagttgcatattgtgaagtatgtgacagttaaaaacacataaatatcatgaggtaacaggaaaaaagcttaaaatatgtatttttgcatcttgttctgagcacaaatgcattctcagtgttatccatcatttgctcacccttgtcattgcttttaagaaacctagtatggttctttaacatacaaaacttagtatttttataaatgaaactggacagagtgatttcatggaagaccatcagattatgacagatatctattgggcagttggtactggagcaacttcacaaggttttatcacttacatcacagttaatctctttgacactcatgggacagaaagtatgaagggagatagagcagctcatatatttgcacctgcagttcactggtttcattttcttattccttgcagagaatgggacagagaacaagcttcaaaaaagaatccccagcttatccacgcccttcggcgatgctttttctggagattcctcttctatggaattttgctatacctaggggtaagaatctcacgtgtaaatatggtgtcatatattattaagatataatcatagttttgtgattacagaagggtgaggacaatcttgtaaccaaagccttttgttttctgtttagtatttgttttcatttttttatatagaattttattacaagtccaaacacaaatgactgaaaattctatcaaagataagtgaaaattcttaaaatgtagatctcaattgatagttcaaaattagaatgggtccaaaaatcaaattacttgtttcaaaattatgctcatttatgaatccagattataatgacttaatagtatatgaggttactggcacctttacttttctgtgctaaaaaagagaatgttagaaggcaatctcataccaagaatgagactccattcagtcagtgataccaaggaatgtttatgatattttctgctcagatagatagatagatagatagatagatagatagatagatagatagatagatagatagaggtaatgtaatgtttatattttgaaaacatatatatgtatatatgtataaatagatatatagatagaattatatagagtaatgtagattaatgtttatgatattttgaaaacacacacacatatatggagagagagagagagagggagagagagagagactgaattgtttacaaaagataataaaaatttaaaatgaggtggtgaggtgcacatagaatgtattttgtcagcaccctatgtcttcatcattgtaaagagaatagcagcctgggaacctgggctttgtgctgtttaagaactttggatatatcccagatgtgttcagaagtggttattgttttctgggtcatgcgagcatcactttgaagcttgatcatagcctgtaaaaagggtgacaagtggaaagtgtgttgagtctgatgtatcaactcagcacaatactgccttggggtgttatgtttcatctgggttgacttgcattgtatttcttcaggtctttatcctcagattgcatgggctttggtttctcctcaaatgatgtatgaacaatatgtagccgtgctacttaaataattttattttatcctgtcccagaaaaagtcattaaaaatttatcttgataaaattgactataattactctagaatcttttctagtgctattattttctagaagaaattcttctggtctttcttaatccatatatatgtatgaacataaatgtatagatgtatagatttgaatttctttttaagcaaattcatgcatattatattatcacatatttccatgtagattcatatattatattcacatataataaataatgtgttatatattatagatctgttatttaatggtagttctatatatgaaagaaaagactataaaaaagataatataatttcttctagtagaatatgtgttataaaatgcatatatagacacataaagatatagacagaagaatgagatatcgtttaaagatatctttgtggtcatttttatcagtgagcacacccaagcatttgaagatattttcagtcaagatctccttgtgagtagacattaagaagagggagatgcagtaaatatgaaaaaatatttaaaattttgaagattaaaaatagcaaaaaaaaatcacaaagcattcacaatgtattaattatctatggatagtgattagaagtacttctgagacaaacggagtgctggaatgtatctctggacccatcacagcctttggagccgaagatcaaatttctgcaaatacccaataaaatgggtaaggaaaggtcctgatgggagagagtagatgaatgtgcagagtgagaaggcacgagaaacaaagtgagcaggacacagtgtaatgatgttgaagggtctcttttatccctccccatcccccatacacagtttcactgagatcacaaagttcagtgttgtaaaactgttgaaatctagatcccacttatttaggtaagtataatttccaagatctattatttatttcaatttaagttttatcttaaaatatttatttgacaaatataaattgtcattgtagaatatacagtgtatatttcaatatatgtatacaatttttcatgatcaaataagggtaattaacatacagatcactcagtcatttaccatttctttatggtgagaagagtaaaatactctcctggttgttttgagatactgttgctaactataatcactctagcagaacgtattccctcaatacttgaatttgttgctgataacagagctttcccagcatcctcgtccctcctacccttactagtctttgttatcttaactcctcttccaactcacagtggaaatgggacaaagttgagccattttaataagcttctactgtgtcaagtaaccgctgccgttgctttactgttgtgtgttctttctgagcattttcttcttcctgttaaataaacaaacattactgagacagatataacaattgtacagataaagataacgggacatacattcaaaatgtgtttatattcttggtcgctgtaggccatgataattgtggcataacaattatttagttgttttcagtattgatagaaaaaaacactattaaaaatgccttcaactatgaaaggttaagacaaaggaaataccattacaaaggaccttatttctacaacagtgatgcaattttaaaatcatattagctatagtacatccccattaactgtggacttgttttttctttatctgattcagcagccagacatagcatgctctttaatatttcagacttccagcagagaagagcaacaggctgctgaaaacctaagtaggagaatcaactaaggataatcatttttttattttattttatttttaaactagatgttttctttatttacattgctaattttgtccccttttctcatttcccctcaaaaccccccctgtcccattcccctccccttgctcactaacccacccactcccacttccctgacctggcattcccctacactggggcatcaagccttcacaagaccaagggcctctcctcccattgatgtcccacaaggtcatcatctgctatgtatgcagctggagccatgggtccctccatgtgttttctttggttggtggtttagtccctgggagctctgggggtactggttagttcatattgttgttcctcctatagggctacaaaccccttccgctccttgggtcttttctctggctcctctactggggatgctgtgcttagtctaatggttggctgagagcatccacctctatatttgtcaggtactggcagagcctctcaggagacagctaaatcagactcctatcagcaagcacttgttggcatccataatagtgtctgggtttgataactgtatatgggatggatccccaggtgggacagtcactggatgacatttccttcagtttctggctcaaactttgcctctgtatttcctacaatgggtattttgttccccctaagaaggactgaagtatcctcactgtggtcttccttcttcttgagcttcatgtggtctgtgaattgtatcttgggtattgtgaacttctgggctaatatccacttatcaatgaatgtgtgttcttttgtgattgagttacctcactcaggatgagttccatccatttgcctaagaacttcatgaattcatcatttttaatagctatgtagtactccattgtgtaaatgtgccacattttctgtattcattcctctgttgaaggatatctgggttctttccagcttctggctatcataaataaggctgctatgaacacagtgatataagtgtccttattacgtgttggagcatcttctaggtatatgcccaggagaggtattgctggatcctctggtagtcctatgtccaattttctgagcaactgccaaattgatttccagagtaccagcgtgcaatcccactagcaatggatgagtgttcctctttctccacatccttgccagcatctgctgtcacctgagttttttatcttagccattctgattggtgtgagatagactctcagggttgttttgatttgcatttctctgatgactaaggatattgaatatttctctaggtgcttctcagccactcgatattccttagttgagaattctttgtttagctctgcaccccatttaaaaatagcgttatttgattctctatagtcacttcttgagttttttgtatatattggatattagcccactattggatgtagggttggtaaagatcttttcccaatctgttggttgccattttgtcctattgacagtgtcctttgccttacagaagctttgaaattttatgaggtcccatttgtcaattcttgatcttagagcataaactatttgtgttttgttcagaaaaaaatttcctctgtgcttatgtgttggagacgctggtattggtacggtgacaggcaggtagataaatggaatagaattgaagacacagatatgaacccacacatctatggtcacctgatctttgacaaaggagctaaaaccatccagtggaaaaaaagacagcattttcaccaaatggtgctggttcaactggcagttatcatgtagaagaatgccaatcgatccattcttatctccttgtacaaagctcaagtccaaatggaccaaggatcaccacataaaagcagataaactgaaactaatagaaaagaaagtgaggaagagccttgagcacatgggcacaggagaaaattcagggtaatctaagggaagctaaataaagggaatctgtaagcatgttcctgacagactgtgatcaccagagagagcttgttactgtagaagtcacaggtgtatactcacacgtatcttcgattccatgtttccatcactacatgtaagtatcattagttcagcttaaatcgagacctttttttttaagtcccagaaagctaacggacatgaagaaagcctggttctcacaatgccacagttcttatattccccagactgttataaaagaggatctgtctctcatatttagacaaagacaggcttttgaatccaagcctcctgctcctgaagcaagagtatttgcggtaattctgcttatgagtaggctctgcctagggtactttttcttcatacatcccctcagtacgaatgctctcagcaaagcttctagaggcctgctatctaggattcacttctcatctctgtcccatccctgcgaacacccacagctggttgcttctctggattcagcttcactcacacctgaactcttcctaagccatttctctagcccctctatatgtgttattatgtcatgttttacacttacatatctatgccacttagaatttacttctccactgaattaagttccatgcattataagttaaattgttatatatatttgggtcttttactggaatttctagataaatcagtatactttctttgacctgtgaagtgtatacatgtatggtttaatatccagtagcttaaatgttcatattatttttattcttcaaatagtttcaattagaatttattcctaaattaaattcagaataattttatttgttgttttaacaaatatttattggttaagcatgctcactaagaatgtattatatatgtcataacacttgtgacaatataaacatatagccaataacctggtgcaaatttattcatttttaaaatatacttaaaatttttatgtgattacactaatcttacaaaatggattaggtgaaacatcatctttgtaatatgtagatttttttagttcagttagtttttttaaaatgtgcttagtagtttctggaatcaatcacatatcatactaatacaggtgctttttactttttatataattcatagctatcatttttctcattaaattatcttagctagacatttcagaataatgttaggtggtcatagtagtcaaggttcttttgctttcctgcctcccacacttgtgtttatcaactattcctgattctggaagaaagtctttcttaggttaacaagcaatgttgcgattcagctttgtagaaattttaaccagatactgatactttttatcaaattagttatttcattgttactgtgatattcacagcttgttcagtagtatattagtattctgttagttgatttcttggtatcactagcattaatattctaaatgtaacaatatacaaaatgtgcttgcaacaagtgaaggtgatactattacttagtagctgcacaagatatagcaagaaactcttaaacctcacatgctagcaaagcaagcactcctgaactaaatccgcaggcctgtaaaaatgcagtatttttttttaagtataaagataaagtccatataatttagctgcaagcctgagtctgcacttgtttttgtatgaacttttctctatggtctgcatatgcactcaacacagacttacctgtctgtctctagaaacatctgattatttgtcaggtacaatggaaatggcttaagggtatgcatctacagtgacttagagctttgttctggaagtgcattcaggtgtcccctggtcggctgcagtgagaactgaattattcctaccatgagtgcaagtcttttagctagtttttacatggtcacttacccagatgacacatggtcttatagtgggaaggaagtatatatagactggcctggaattcataataatccttttgcagccttcctagatagggttatactcatgtggcaggcctctgcatagtactcctagactcaggtcatgcttccaggggtgatgttataggagcgaaccttgtaggtaaccagagtttgccaataaggagaactgtccaaacaacagaagtgcctgaggtgacacagaataaatatacaggaataagaatagtaaggaagaaggcatgaactcgtgagggagtcagatgggacatggatggagttggaagtgagaaagtggtaaagtgtttctgtgtgtgtgaagtattcatgtatgaaattctcaaaaaataaatggaaaaatgggtatttgagttttatgattctgaatttagtgttcttattgtcataaacattagtattaagcttattttctaaggaaaacaattaagaaacttgcgttttgatttatgcctgataaaattgttaaaatacgtcattgaatattatcttatttaaaatagttttgcattttttctattggatacaattctatttggagtagtatttcaatgtggtgaaaattagggaattttttttcggaaaatagtctgagcagcagaggacatgcaactcgcatgcaccaatgctgatttttaaaaaggggctgtgctttatagattaactgaggtatcagttacagtttttcttcacacttaaaaaatgtcatgtggatctatgaatggttccattgtaaatattagagaacatgatacataaaagagattaggggaaatgatagaaggagagagtctagaagtgctggttttgtccttgagaactgtgaggtagtaaggtttatgctgtgctctacaaaccatcttgttattgaaattttccagtaaagaaacaagctgtatcttactgtgtgaatatatgctcctccagagtaatactgtcagtgtccttatgagatgacgtgtattgttgaaaagatgagtatgtcttgctagttgaggcaagatgagatctaactcattagtagcaatatgtaaaataggcatgccatttaaagtattgaaagctataattactgtattaaattgtaatcaaataattaagcaaataagtctagtatgataaagtaggttattgaaaactgtaatggagttctaacattagtaaacagaagaaaaacatttaagcttataacttacaacttgaaaaaaaatctgtgtatttataagagccagaagctggaaagaacccagatgtccctcaatagaggaatggatacagaaaatgtggtacatttacacaatggagtactactcagctattaaaaacaatgagttcatgaaattcttaggcaaatggatggaactagaaaacacacacacatggagggacccatggctccagccacatatgtagcagaggatgaccttgttggcatcagtgggagaagaggaccttggtcttgtgaaggcttgatgccccagtgtcgggaaatgtgaaggtgggaaagagggagtgggtgggtgggtgggtggataggggcacaccctcatagaagcaggagaatgggtgatgggatagggaatctccagagagggagttcgttaaaggggatagaatttgaaatgtaaataaataaaatacccaataaaataaattatagataggccatatcaccctgaatgtgcctgcttagtctctaatataattcaacatctaaatatgttaaagatgtttagctatgtaataaaaatatgatgcatatgtaagatgatgtacaataagaaatattttatatactttttaaaataagttttatttattagatgtctcaaacaattggcatattatatctgggtaagaggttagaaattctttttgatacctccctttttatttggcataattcaaatccatttcaaccctgcatgtaaaaggaaagaattatatctcattttgtgattatcttggaaacttttccaaaggcttgaatcttcttttctatgcagagctttgaattatactaatatgaagtgctgtatataaagtagagaatgagcatctacaataaaggcaatgattaatgacagttaggttgtagttaattccctgtgaagatgaaggtgagatacaaaacatggtcatattctgggactggtgggacaggtagtgttggcacttgggatttggaaaagccatcatagagaacaatgaaaagcaaattaacagtaaaaatttgatgtcacatctatattaatcttctttcaagatttagccctaagttctattttactaagttatcataaaataaaaattgggagatgatgtctttttgtaattcaaaggccatttgtggttcaaatccatccatgtacatttagaagggttgatgaatcagttgaacggcttggttggtaatcagttttggattattgaagtttatgggtttattggaaactggctcaagatagagtgctctagtgcacaccttactgatgcacatacccagctctacactggcaaagggaaggaacaggacccaagcggctggctttaaataataccagtggtgctggcatgctcttccctcctgaatccagctccgctcaatggttgtactcttgagaagctgttccttctgatcataataccatggctcaaaatccttaaagaagttcattttgaaatttcttagtgtcttgcttttcttggcctccatttcttcacctgcctgcatagtgaaaacagttcgtacatgactgagagttgtgaaatcctctgggacatattttaggaatggtttgtgacatgtacatgttactagttaatgtaccacttcatcaagtacccctttacaatatagttgctattcatgcaggttttagtgaacacctcacacaaacttgtctctaaatgacttttgctgtaaactaataaccaagtcttatttcagagtatgcacaaagacactatcagcagtttcataaattgtccaaccttctctgtaaaattattttaaattattgtaaagatgaaattttcataattaaaatgtgaacaagaaatgaaatttaatcactgccttctcctgcaggaagtcaccaaggctgtccagcctgtcttgctaggaagaatcatagcatcctatgatccagaaaacaaggtggaacgttccattgccatttaccttggcataggcttatgccttctcttcattgtcaggacactgcttcttcacccagctatttttggccttcatcgcattggaatgcagatgagaacagctatgtttagcttgatttataagaaggtaatactttttggaagatgttatttggtcttgttttactatttcagtgctggatattaaattcagggtttcttgtatgccaggcaagttctttgctgagtttgctgccctgcacagtctcaggtattctacctgacatgtcttcagtgccctaaatgtgagcttgtacaagaataggtgtgaatacttattcctgttttaggtgcctatgaaatatatggcaggtgcaagtattgttctgagttatctatccttgataatgcaaagtgattcagtcgacagttattaaatatcttctgtaaattacctatatttcagatgtcatattttaggggaagtatttgaatagtttagtggttttttttaattgtcacacaaaatagacaagtgagcagtaagctaaatcaatgtcagattttttaatccactttttttcagttaaaatggcaaatagtacaagactcattgacaaaatatcatcctatgataaaattctatttttactagcaataatatatcactgttaatgataacctaagaaatacattcccaccttagccagctgccacagatggtgacagtgtcacagtggtgacactcatccatctccactgtcttactttgagtttgatttttttgtcatccagtgaattctgaaactttataacatttttgaaatagcatgtacgttgagatcatgtgaacttaactttgcttttctgcattcattagctagataagaaggctttgtaggatctaaatagattgaaatgaacagtaaacctccctgcactccagccacagccacctgccaaaccaagcaggcctctgaccaagacaaagactctcctctctgtgggacctagcctggagccccgtcctcctgcccttttcccttctgcccggggtagagtctgcccgccggttcccactctgttctcagttcttctgtgacaggcatctgaggtgttcaagactgagaacttgacgttcctagcctccatgtggcccagggaccccagaactggctcttctacaacccccagtggaaggcctgcccagtggtgccatgtgggtgtgtgcagttaaacgccctgcatctgccttgcctagtggcccgagccctgataggatgtgggatcccacttttttttttattagatattttctttatttacatttcaaatgttatcccctttcctaatttcccccctgaaaatcccctatcctatcctctcctccctcccctgctccccatcccacccattccggcttcctggccaggcattcccctattctgaagcatagaaccttcacaggaccaagggcctctcctctcattgatgactgactaggccatccacagctacatatgcagctagagccatgagtctctccatgtgttttctttgattggtggtttagtcccagggagctctggggttactggttagttcatattgttgttcctcctagggagctgcagacccctttagctcctagggtcctttctctagctccttcattggggaccctgtgttccatctaatagctaactgagcatccccttctgtattagtcaggtactggcagagcctctcaggagacagctatatcagtttcctgtcagcaagctcttgttggcatctgcaatagtgtctggggatcccactttttaactcacatctaaatgttgtcttaaattttgacaaaactcaagttatttcagtggcaccaatgtgacttcattgctctaccaagtgatcaaagaaagatatattggtggtatttagatattacctttatctttgctattttctttctttagtaacacattatatatatatttggcttataagggctatgggtctgaaattgacctctaacaagtaatccattataccactacagtacatactcaaggtcagttgtgttataaaatcttgatagccatactttattgcttaaaaaacacttttatgccaggcgtggtggcacacgcctttaatcctagcacttgggaggcagagacaggcagatttctgagttcaaggccagcctggtctacaaagtgagttccaggacagccaggactacacagagaaaccgtgtctcaaaaaaaaaaaaaaaaaaaaaaaaaaaaacaacaacaacaacaaaaaatcagttttatgaaggcagagaagaacaaaaagaagtcagagtttaattcaatctcttatgctacaaaatcatcaattcataagttccaagaaaacatgaataaacaaaaattttagagattatttggaatgtagaatctataaacttgctatcaaagaaaattgaatttactttaataaatatttgttaaaagtacttctaataaagataataactaagcatatgtatattgcaccaatgaattatttaaatgtgatctaattttatctacccacaagtttctactatagttgctattatccttcttttaaggaacccaaatcctataaagaaagaacattgaaaaaaaaggtatttcaaaactttaaaatagataagtaacagccttagaaaatggtttccaagtaattaggtaaaacagaagtatggaaacataatattgaggcaaaggacatgtgaagtaaaatgaaggggatggttaattggtaatcaagtccttagagatattggtgaagaatttgaagctgctgcatatttatttccctcacaacatcacctactgtgattgctgatcaattagtttatcttatagaccacatttaacttcccgatactggcttatcaccaaagagtatgaggacatcttcatggttctctagctggtccctacttgcactttgtcttggcttgtcccgtagcttatatccattcccctatccgtactgtttcaggttcaaggcaaggacacataggatccttccaacaacatctgcaatttatagtagagaaatccactcccattaaattctgaaaccaaacatgttatactcaaaataatgaatactaacacaagctgaactttgcccatcattttgaagattaccaagataactgaatattaactatgtgctatggatgaagctccatgctttagcctgtgcattgctttatctgacactgaaattccttctaaacatatgtaatctaccacagtgggttctccctctcttcttatttctctaataatattttgtaattacctatactcattccttcttcatctttgcttctctaaatatatctattttataattttatctctataaaatctttcatatttttaatccaaattttgagcccactctacattctgccttccttaactaatttatcatattatctatatgataaacacacactcacacacatatgtgtgagtgtgtgtttgtgtatatatatatgaattttttctaggttactcccaggaaagaattgtatcttaataaatgctaattcctgatacatacagaacaatggtttacatctattaaatactcaacaaatatgtgatgagttgaaacatataaaatgggtgctttgctgcaaagccatctaacagaaaataagttactaaatttcaccaggcaaaggattactctatttcatgatcataatttatctaataagttaaaacattaatttatagataaataaatgtttttaatcagtgatcttccatgtttttcctttgtaatatttgaagactttgttttgttaacataaaaatactgattcagttattagtaacatacttttgttggatttaagtacttttatcccaaagaattagtgaaggactttatgaaaaaattaagacaaggattcactgccttaggttccatcttttatttctaaactttcaatttttttattgtttgacgtctttaaatggttacataattaattttagttatctgtatcctcagtttctctctcattccttgccttccctctctggaactcattgtagcagtactcgtctattttaatgcctttttgcgtgtggctcattaagtttaatgagagcatgggtgcaatgatatttagtggagcaagggacgcttacatgtgttgcagacatgagaacagaataggacaactcctctctaacaaccatgagcctgcctcacccatcctaaaatgttttaccatgtacagataaccccagctctaatgggttcatgactgtaagtggtatgtcctgtagcaaaggtgtgtgtctactctttctataggtcagctcttaaattcttcatgctcccacttctgccatgttctctgaatcatggtggaatgatacaaccttcccatttatgccaaatattctgttaccacttatttgccactggttaggtttctgcagtcaccgggaaccattgtagtaagaaacttttacagtaacagctgggtgcaagctctaatctatggtataaacatgagtagtgagaaggtagcttgataacatgaccatttagcagaataacagttacttgcataccttggtggtcaaagacctccccagtcagagacttaactagggttacagaaccaaatataagttcccatttgtggaacaggccatacatataatcagcaagcaggtagtcatcaccataagaattacactactgctctactagaggacacattttacaaaggtatgtgattactatagcttatagtcccagctgggtaaggctgatgatgctttccccagtgacttgcatatgctgcctctggcactacgaaccagtaagcaggaagcttacacttcatctccatgacctgtgaccatagcatacaatacttaacatcaagttctggtaggtatccaagagcactgggaaaagcctgtgttgtttggggcacctctgagatcccccttgtcagtcactcatagggaggtatcccctacccagcactgggacttttgtttgattattcatggtatctgagaggaatagcatctaaaagaagacctctatttaagctttttaaagattacatatatttcttagaactgtagaatagtttactaaaatggtaaatttgaactcaaatatgtatagtttttaaacaggttcaactattattaactaatttctcaaggcatgatatatgttattggcaagacaaacactaataataatgtttacaaatctctatattaaatcatcttgataattgcaatttgggacacacttcattactacataggatagcatatgttttcttgcattattggtgacagagacagatgatgagtaaatgagtctctgccagtgtatttctgtatgctgataagattgtattattgtggtgctggagagatggctcagcagttaataacactgactattcttccgaaggtcctgagttcaaatcccagcagccacatggtggcttacaaccatccgtaatgagaactgacaccctcttctggtgcatgtgaagatataataattaataaatcttaaaaaatagattgtattattgcaaatcctatccccaccacatagtcctctgtggaactccattctgagaaagctagttaagttaaaactaggtagtgccattttgaagccactcaacagagaatgcctcagccacccaaagtagagggaagatgactgtctaccctactccttattgaactctccactgtgaactactacttgctactcttcttgctgtctactgtctccccaccatgttcctttcataagtctttaccttaagtagccctcaaccctggcctccattttcatgtctaatgtgtaatactatcctcctctctttctctactgtctctctctatttttcttacttttgtcaacatattattacacttgatattctaaaaatgaaaagctgagatcctcacatgaggaagatctggtagatttgtcctttggggcctggcttacctgactcagtgtaatatttatttctgttaaaaaaaataaaagaaaaacaaatccccaaaactcaaacaaaaccactcaaaacaacaacacaaaagattcaaccttatattttgcaagtggaaataaaatatcattcttattgtcaaagacaacaaagtttctatatgacagaaaatatctaaatgtaagcatttcaatatatttgtttttcagttgtatatttttaaagctgaaaaagtataacagtaacaaatatgaaacaaggttgacctctcaggttaagatacattcagtcacatcttactaatgtgttattgatgaatacattttatatttgtttgttgacatcacctaacttgccactttttcttttagactttaaagttgtcaagccgcgttcttgataaaataagtattggacaacttgttagtcttctttccaacaacctgaacaaatttgatgaagtatgtaccattgacttaatgttttatgcattttattagaaatcaaacaattctaaagaaagatttatcctgcatcagctaacagtgataagtagcaaagtcccaccaatagctagtttggctatttctggaaactgggaaagctagtcctgtagcagagcaccattctgaggtcaggtacgattgcccaactcaaacatacctcagcttgctcttaataatgtttttcaaaacttgatccttatcagacttagcttgcttccttttagtataatactttaaattgttatgtactttgactaaatatgatactctgagcagttcttgttctgtgctgtcttatgtcacaagtaaattcaaggaccttgaggacagataccatgttttatttatctttgcattttcaatatttaatagagcaagtgttacggctgaattgagtagcagagagagagagagagagagagagagagagaggaaaacctttttggagagtcccttgttctcatgtgttctgtgtgagaacactagctttattttaaaaaggtattaataaaacctaggcgcaatttcaaagatacacaatcttaattccactgaataaaaacataatgcataaattgtaatatgctaagaaccatgaatttattgattggataactcttcagtgttcattttcttccacatgtgtctctctgcttggttttgattgtggaatgtaatataccacttgattttctctgtgcttttatttttcagggacttgccttggcacattttatatggattgctcctttacaagtgactcttctgatggggcttctctgggacttgttacagttctcagccttctgtggccttggtttactgataatcctggttatttttcaagctatcctagggaagatgatggtgaagtacaggtagtggtctttttcaaagcttgaagaaatttgaattgggcttctctaagccctaacaataaaactatgccatgtcacttagaagggattattttaattctgtaaataattttttctataagaaaaaggcaattattttccctattggtctatagaatttctttattcatgttctaagtaaggttcagtacattttatattcataaagtttaggtaaaatggatattgtatttctttgaactggaaggaatgcctaaattttgtatggaacaaactggcctcttcctctccatatagtagggccattctaccaaagcatttattacttttattggtaatatgagttatatgatgtgcttattgcagagaatttgtagtttgcctgtttgaatgtgatagaaagttgaaaatctggggctatacagacaggtttctgttttagtttgtatatgctttcatttgcttcacaaaatggaggtgatctcctcttagagactttgtaaaggattggattagagatattgtccaaagttcatctaatggcgggtatctgacactttttaaaaattttttctcttcctgtttttctgtgacagagcgtctctctgtatccctggctgtcctggatctcactctgtagctgatctagaactcagaggtctacctgcctctgcctcctgagtgctggatttaaaagtgtgcactggctatgattttgtttgttcccagctgtttaataacaaaatgtttatctatgtaataaaaatatggaatttttcaaaattttgaatagttattagtagataatttgacttgtttttgttattgattgtttgatcaattgattggtttacagagatcagagagctgcaaagatcaatgaaagactcgtgatcacatcagaaattattgataatatctattctgttaaggcatattgttgggaatcagcgatggagaaaatgattgaaaacttgagagagtaagttgacataattacaatactggtccaattttatatttaacatttaaaactgaccactcaggtggattttcaactcaactcatctaaaactcaaatatatgtatgtcctgagttttacatggtttatatgtcagtgcctataatcattttggtgagcaaatgttttcttttgttttttgagactggttctcaatatacccttggctagcatagacctctgtatgtagatctagaccttaaaggcatgtgccaccacacctgtccctggcttatggttttacagttgattcagtttttttgtagtgcatagatagttatctcttactaatgattctgctatactagttcacagttgtttcatacccttaatttaattaaaacaatgatgaagatgctggggggctaattgaaaccataaatggaaatactgaaatatataattgtaagaggaaagggtgatcttgtatgacactgtacttcaagtattatgacacaaagagcgggtgacagccacatttggacaacttctgttattctgagcctgaggaataatgacaaaggaaattttccttagggctactcatataaattgcttacaagaggctaagtcagtccttgtaacaaaagccatctcctgagatggaatctttacttagcacctgtgtgtatcttatcttctttcacctcagataaccttttgcagatcagtaaagattacctctgaccaaaaaaaaaaaaaaaaaaaaaagcacagcaaggctgatacatcattactaagataattttgggtaaaataaccatgagcattgctgtggccatggaccgtttttatttagttgacttccgtgtcctaccaactacagtcaaggaaatgttttagacttctggggatgagcggaccacgaaagatactactaatttaaagacatgagatatatgagtatttcacagggaaaaggaaataaagagtgctctttgcaatggtgtgaatttgattatttcatattcagggtgctggagacctgtagacaatggtaactgagccacagctgtgtgattggaacaacaatggaaatgcttaaatgttaagtcctttgccatgtaaatagaaatagcaaaaagagtgtttattttccaaatactattgctcacctgtttttgttatgcctttcaaggtaaatctaggaaaggaattgcattttctttctagaaacatccttaaagatcttggggaattgttgagttgataagagttgtttctcacgttaacaggttgagtgctcccctgcactgcctgtaaacacagtcatggcagggctggttatcacagaatccagttttctcaggcttcataatcagcttgcagtaggccgttcctgtggctgacgggtttttgtttcctttttggggttggttttctttttttgacattggtattttacccctcttttcctcacataataaaatccatctttcctattctgaatttcaggctggttaattctaatagctagcatttgtctggttgtaacctgtttgatacatcatgaaattgttacctgaaaaagctggagagttctgacgtaaaaaggaaagcaggaattgctttaccccgcagagtaaatacaatgttctaggggagactgactggatgttcttaggattacctcagcctagaaagctgttgaactcggccaaaggctatgttaatgttcttgaaaaaaaaatctgccttttattgctttttagccattaaggtactttcaattttttatacgaaactgatagaatttttttatgactcataaaatgttagggattttatgttagtgtatagatgattctgttgcgtgtttgggatcaattattctttttcctatgtgacttcttccttttctgagctgttctaaaatattggaacagttttgacactttactaccatttgtaaacattctttccttttataaataccaggcttatcaatgtatttttttatctctagaagaaagggatacacattgctcttttacatctgctatgctgtcatctaagcttaattacatctctacaagggaagtattacggtttttttagtgatagaatcacatttaattagatggaagagtgtcttcctttaaacataagtaagactagtccatcttcagtacaaatttattgaaacactacaactcactaggctgatcacaatataggctatacacatgacctctatccgtgagctcaatagtatattgttttctttgaggacttatttttttttttttttagttctaccacttgacaataacacttgcttctatggattagaggaacagtggaagcatagtgcctgtatatcatgtgccttcctgcaccaggctgtagatcagatactgttcctttccgacagagccttcattttgtgttcaccattggcctttgcccacacaagaactggttgtttttacaaatgatcacaattgggttgaggtttatggctcctggaacagtggcgaggttgactgcagtattgttctccatcttccttttgtcactaaagcatttaacctcttcctgtatatgttaaaaaagtaaatacctcccagttgaagtacagactagaacagactagaggactgcaactctagtgaggtgcgactgcagataattacatgacaatgagagggactaggagggaggagctactccctgctctttgaaggaccccctgcaactgagtgacttggcctctgactccagagtggctcctgggaagctcaggcagcagctcagcagatgtcagcagatgtgactgagagacaatgcccagtcacgtgtttctcactgctctttgatatacacacctcgccagtgctatttaaagccaagctagaatctcaaaactactaagaatatgatggataactacagaactgtcccttttgttcataaagcttgtaacattgttttcccttccacacatcacttcaagcgttaataaagaagttactaaagatataaaaataatataaaagtaaatctatttagataatacaatttaaataaattttaattataattataaatttaattatgatagcaattgaagttcttaattgttttatgttaacaagcattctgtgtaaataaatggtatattctttaagagtcatataagctaattaaggtcaagagaagttttgtaacttgcccaaactttggactgtatattcagattttgtattctaagacacctgattattgaaagaaaataacgtgtcacgtcttcttctgttttgcacagggtggagctgaaaatgacccggaaggcggcctatatgaggttcttcactagctctgccttcttcttttcagggttctttgtagtctttctatctgtgcttccctacacagtcatcaacggaatcgtcctacgaaaaatattcacaaccatttcattctgcattgtcctacgtatgtcagtcacacggcagttccccactgccgtacagatatggtatgattcttttggaatgataagaaaaatacaggtaacttccatgatggtatacttacatgattttggaaacattttagaatttgtatagtggggaaaatctctaaaatgaatttcttgattttggatttattaatggattagatttccactcttcattttcatacataatttcatgagcgcttacagtgaaaatctaatgaaataaaatcctaggagattttgtaggtcaaatgaatttaaaataattatttctataatctagaaaatcccatccaagaaatctgtgaatagatcatttctaggcagcttgtaaatatccaaaaacattgaaaataaatttcagcaggaagttaaaaaaatgttctagctagccctggaatgctcaccttgtaggccactgtactttcccatgaagcattgctatgttccaagaacttcagcttccagcagaccagaaagttacctgatccctggccaggtgggacttacagggttattttgagcattaggtaagaagtagtttattcagagcaagttgaataaacttctgagaaaaaaaatgtcttattatcccttaaaatgtatatttaaatattcagtgcagaaagtaaatcattgtgaagaataaatgtgggatcgagggtagactgctttttaagaggttctccaattgtttaccttggactgatgtcacaaatgacagaaaacatgtaattttggcttttaaatctgttttatttggtctttgaaacttttgaattaattaatagaaattagaagtagagagattatcatgtgtacctctgtccacaggcatccatgtgtattcacttacgtgtattgagtgtcttctggagatttgcgattatgtagtaatttgggttcccacagttacagcaactgccctcaaatgtgtatagcctgcccagctcatcaaatcttttacagccttttctattcagcgtttcacccccaaggttaaatcaacttgagttgtgtgactagagcagtcactcaaacttagaatcatagtggctctatgacaaatcttatttccctgctgacatcaccctagttgggtggagggatgagagaagaaagacagagagaaggggagagatgtaagaggagaaatgggagtatctatgaacagtaacacagaaacatctaaaaaaaaaaaagagaaggaaatgagacaaaccaatagaggaagagaggggggtacaaggaagaaagatcagagcaaagattccaggtgcacagatttaagtcttatgctctccacctttcctaagaaccatgtggctggaattctctgatggaggcctttctcagagaactgagaaatagttctatgaagtccttctccttccctttatataaggagcaatgattatgatgttgctcgtaaagagagtgttaaaaaaaattgttgttcttttcacttgtactagccttgaactggtacatgaataattgtcagggtttcattagaaattcatattctatataacagtataagaaagaaacaattgcactgatatctaatgtataaaactaatttcatacattaatatatttaaagaatatattttgactatgatgagtcctactgcttggtactttaactttaagacaattgtaacgttaatttattaagaaacaatttctaatttaattgttaaaatccatacaagacactgtaatgttagagtggaagaagatataacaatacatttttgctattgtgattctacaattgaaagatttttgtcttcattgactaggatttcctgcagaaacaagagtataaagtactggagtataacttaatgaccacaggcataatcatggaaaatgtaacagcattttgggaggaggtgagatttctaaatatggtcgatttttaaaatatgtaaacaattgtgctttttccttttcttgcacctaaatttctactcaataacatataagattcaaaagatattatatctcatagggatgtaaggagggctatcctcttttataaggtgaaaagtgggtaaccaggaatattaaatgcagcataaagtgcctttatttctttaaagtcatataattgatttcatataatgggccaggaagatgattaccttcgatactagatctaaatcctgtctctgcaatacactttccatgtaatctaaatcatattatgttcaagttattaagcctcaagtgtcttcatgtgtaaaatagacattatttccctactgactaagatgatttacatggtctgttcattagtgcactttgcaaataatggtctttcagtgaagattaacttctctaatcatgactcctaagtcttccctgcctatcactcagaattgatgagccactgagttcccatgagcagcttccagcagtttactcactctgtatgtggtgtaggtgacctcatccagcctcaacatcagtgagctgatgacatgcaagtgcaaatctctaggcctaatttcaggcttgcatgctcctcatcaacttcacagtcatcactcctcaagctttactgccctcgtgctccagcatgttctccatctcctttcctggccacactgagaggcaagctaggataggatgcattacatgccaaactttcactagataaatatttctttttaccgtgttcaacttccattcttcctccttactcctaattgaatcctcaatgttgaacttagaactactgtttatgaaaggtgaagatagacccatacatttgaaatctagatgaaatacaacgttacttccttttttcccttactattttaacctttgcttttgtggttctctcttgtttcaagacatcatcattccttttaatactattgtttgggtctgagttttcatattctggagccttagtgatattggcataatattaaaaaagggagttgattctgtagaaagcaaggcaagaacaattgtgaggtgcaagtggatcataagaagtagcagacaatgaattctcaggcaggttacctttaggaaagaggatcgttggatggtgtggacctaaaaatagattcacttaaaactaggcacacaagtttcccaggcttcttcatgaccactatttgatgatatatattttgctttggagacagtacctccgagcttccattgggcaatagagaggcaagcaatttttaaaagaggatttctctccaccccatacatactcttgtacagaaaaattattttgaatccactagcaactttgtcacttgtatttgtagccaatgataaatgtttggagcaagtcttagaggattggaagtgaggattgccttgtaaatctaccttgtgagctacttgtttttgactttttgctgagccaaagtctacagttttaaaagaggaggattgaaaaattggtcttatatattatattgaagattaattaatgtttatttactaagtctgtaggaaaaagggtatatgtgtatacttccttatagtcttggtgtacacacacacactcatacacacacactcacacatacacacacacacacacacacacacatactttagccaataatatgagactgaggcaatgataagtaaaagtctgataaagagaaattttgttctcattacacataactatttctcaaacacattcaaccatactctccagaaaccatgtgctttatagttatatattataaattaattaatactatgtatgtattttaatggatcctgtaccatgtatttcttaaactgattgcatataaagttttctatggaaaatctgaaagcattattatcttcaatgtgtatgaatagggatttggggaattactggagaaagtacaacaaagcaatggtgacagaaaacattccagtgatgagaacaatgtcagtttcagtcatctctgccttgtgggaaatcctgtgctgaaaaacatcaatttgaatatagagaaaggagagatgttggctattactggatctactggatcaggaaaggtactgtctctttaaattgttaattttctgagaaatttgtacacaaatactgtaattatgtaatttctatccccctttccagtatcttactccttccatgtacccctcctcacttccattaaaattcaagacctttttgtttatgattattatatataatgttcttgatctattttgtgttttatatatacacgtgtttagaactgatcactcaagattggataacctatcagcgagctaatttttaaagaaaactgattctccctcataacaattttgcctgtaaattttcatctaggggatggagccttgtgagataacctcatatgcattgtcatgtcaactggtaatgtcatcctgtaggacttgtttagttaacagtgttttgaatatttcataggtgtagcatctcattgtctaggagatactatctagcagtagacatgcctgttttctggctatgttttagccacatcttccacaattagccctgagccttaaatacagagtttgcattgtagatgtatcaacatggtcagttcttctttgactagctctagatctctgcaatgctttgcatccagtgcaaaaaaaaaagatgtgtctacaaaaagtggtgagaactatgcttacctgtggctatgaagagaagtatttagaacccagttagaaattatattagtttacaaaatggcagtagtaagagctatgacctctccagctatgggtagtagttaggtctacattacaagattactaggtatgaattgaatactcttaatgatttggtcttaggtctaatcaggcagctgttaggtatccctaggataccactgttgtaccattgatgttgtattttgccaagacatcaggttttttttttgtttgcttgttttttaatctatttatttcatatcattaagaatttaatttactattcatttctcctttttgtgtactttgaagtatatgtaatatttcagagaaaatcacatatgtatggaatatctggtgtaatatatatatatatataaataaatatatatatatatatatatatatatgtaatatgtaggaatgtttgagtataatgtatataagttgcttcagtaatgatttccttcaggtttttcacataattttatacttttttgtatataatttagccttgtcatacatatagatggctttcaagaaaaccatccttttaaccgttctttacttcagatctattttcaaaactggtacaaaaaaaaccctgctttagatttcacctatttctctatatatttgacatctctctatatgtggatttttactgaatagacccaggcttgctttttatatattattaaaatatgtcaagtaagtgttaaaatgttaaaaattttaatttattcagtggctatgttactccccacccagtaccaagaacaatcaattatgatttggagagatatctgacaaaatctaattggctagaagtgaaaagcgctcagggattgtcacggtttcagatatgttctgtcatgtagataatgatagatacttggtttttggtagttacctagataaatcattaaggaccaaagaaatgaaatgtacttgagccaatgctttgagcagcagagtacttgctgtggggatccataaaatagatccttgttgcaatcagattgttgttttagagtacctttcagtaatacaaatatatatttattaatctctaaaattctatttcaaaatataaagcaatgggagaggaagggtgggaagaaaaaagaggtgggagaaaaataaggacaaggcagtgttgttataaaataaaaatgaaaattaaggatcacaggagcctagcatagatgtctcctgagaagcttcatctagcagtggatggaaccagatgcaaagacccacagccaaacatcaggctgagctcaggaagccttgtggaagggttgggggtaggattgaacaagccagagggctcaaacacaccacaaaagacctacagagtcaactaagctgggccgatgggtgctcccagagatcaaagcaaacaaagagcaggcaggagttgttcctaggctcgctacacgtttatagaagatgtgcagcttggtcttcatgtgagtcccctagtaactggaccagggctctctgattctgttgcctgcagttggatcccctaccccctagcaggaatgctttgttggggcctcactgggagaggatgcaaaaatttaatcctactgagacttgatgtaccagaccaggctggtacccaaggtgggcttctctttctctgaggagaaggggaggtggtaatgggggtagggatttgtgagaattcgactgggagagggggctgaagccaggatgtaaagtgaattaataaaccaattaattaatgaaaacaaaaagcattctaaaaggtaatttgtttctattttatactagtatcttaaacagggattttattttaaagagttttatatgagattttggaaatagcacaaattttctaatcactgtacattttgcttatttttctctccaattgttttcttatctgtgacatagacatgttgttttgttttattttatttatttaaagactgaatgacctttattgctcatttttaattaattattttatttatctacatctatgctcccagaaatcttcaccctattcaccctcccctttgcctctgagagggtatctaaggctgggcatctctcttctctgggacatcaaatctctacaggattaggtgcatcttctcacactggggccagacagatggcataggcatcttaaataaagtagctataattttatattctcttcctacagaaatgcttgctcctcagagtgttatttctttcctcattttctgatatggaaatagagacagttttcacgattaaatgaaaatggtagcacaggaatctgcataactaatgctataaaagacacagatgaccagaaacacactgtctgctgaggagggggtattactagcattacacagaattttaaaaatgaattgttcatgtacttaagatcaatacatgaaagaggtataaaaatagctttggaagcacagttgttgaacttgtcagtagttaaccatcaggcaattctatgaaaccttaatgaataagtaattaaaatctgggactgttcttgcctctcacagaaaattgctgtgaaggcagagaaagatctgggttcccttctgacaacttactcagagagactgctgttttgtaagaataagaaggaaaaacgattatttgattgaaaaaatgtgaagctataatataagatttaaaatattaatatttaaagttaattttatacctctcaatttgatagtttattatttaagacttaaatataacctaataatcttatatgttatacccttatatatttacagagatttttgtataggtatctttggagtagtatggctatattttgaagttctgtagtccttggttatagaaaaatttacaagatatgtagttaagtgagaaaagcaaaacaaaatttttgtatagtaatgctacaatgtactcaaggatactaaactatattattattttccataaagtctatattttgttctactggatacatttataatatctatatatgcttcatatttcacttattcttaacagtttcttcattcataaggagcttggataaaaaaatcaatatttttccttctcctgctacctgtttttctttctaccaaatggtacattaggagccctttctgtgtaagcacggggacctaagcttgaattccaagctcacatgttaggtggatccataaccccacaatgagaggctcagacagttggatcaaaggagctcacaggcagccagtgaagctgagactgtgagcttcagtttattgagacacttggtttgcctcaagcaatggaaagagacatagaagatactagtatcctgctctggcctctacatgtacacagaagggtacaggtgtccacatgttcacattgtagctctctctctctctctctctctctctctctctctctctctctctctctctctctctctcccccactctgtgtgtatacacaaacttgacatccatcatttctttttttattgtagtttttttagaaaacatttattaggttttttattggatattttctttatttacatttcaactgttatcctctttccttgtttcccctgtgaaaactcccctatcccatctcccctctccctgctcactcacccacccactcctgcttctctgtcctggcattcccatacatggagcatcgatcctttacaggaccaagggcctctcctctcattgatgtcccacaaagccatcctctgctatatatgtggctagagccttgagtaccgccttgtatactctggttggtggtttagaccctgggagatctgggggtactggttggttcattttgttgtttcccttcagtttcttgggtcctttctctagctcctccattgaggaccctgtgctcagtcccatatgtttttataatttcttaaagatgaaagcaaattttcatactagtaaaatgaaagtactttctaagactgaatctgtgttagtttattataatgaacacactcatgtagttagagcataggggcagcccatagcccaagagctttcagcaagtgctcactgtcaccagtctcttactacaaactgatcacagcaatttaagtaggggctcgctcttctttgtgaaccttagtcctatgttgcccagatctctttcatcccctttgtattttttatgcctagaaaagtccctgtatcatgaagtactaaaacatctttaatcaaatgagttacactctttaaacattgggagacttgtgattggaataattggacgcaagaaagggataagtaatttgatcaaacaatttagctgttgtttttatttgtagacatcactcctgatgttgattttgggagaactggaagcttcagagggaattattaagcacagtggaagagtttcattctgctctcaattttcttggattatgccgggtactatcaaagaaaatatcatctttggtgtttcctatgatgagtacagatataagagtgttgtcaaagcttgccaactacagcaggtaagcatatttatgaaaaatgctgattgtgttagctacttgtgtcagtgttgtgataaaattgcttgactactcaccttgaaaagggttttattttaaattcttttcagggatgataccgtccatcttggcaaaggaggggcaggaatgggaagatggcgagacatgttatatccatagtcaggaagcagacagccagcaggaagtggggcttcaaggcctaattctagtagcttactttctccagtaaagctccaagttgtaaacactgtcctaccccagtgtacccccaactggaaataatgttttcaaacacatgagcccattgtaggtatttcacgttcacaccactacatggattatgctcattcagtcttcagactaaccaaattacacagttagttctctattgagttaatgtaaacatgtcaaggaccccctaggattaagctggagtgggtgggtcagtgaataaaaccatgctcctactttaagtttacaaaattataaatagatgcagtttatttttaaagtgtgtttgggtgttgtaaaaataaaaattccttatgcatggggtgtggtacttcatgagtgcaatcctaatactcaagagactgaagcaaaaaggtcatgaagttgaagccagtcttagctgtctaatgagttctaggccagtctggatcacatggtaggatcatgctaaaaactaacaaaccaaaagtctgtatgaattcaataggagtattttgtgtacactttgagaccacagtgaaaagagaagctatcctagaaacttgtgctaaccttgaagaagatagccatactttcccaaaagtccttcttctacaacatgggggttgatgtgttctgggcttgttaccagatctgtttttagaagagtttttctgggcaagaattggagggagtaataagtcttacttggcttattttgggggtggtgggggtgagatagggtggtactttcttgctagatttagattttgctttgcttgagtatgtattttcccatataaatgatttcacagatgatattttgagtaatcaaagtcgatctacaaaatgtacataatccaaatatagcatttatacattactattaataaatttagagctgtggatcatccatgcaacaagtatttacaacattctggacacaggtagatcattggaatgcttagatgaagaaaattgtatttattgttaaagcttcatagtaggatggtatatattaataatagaggattatatggtttgtatagtatatatcaataaaatagtgagagaaggagaagcaaaatatattgttctttcatttggatgcaaggacatattacaattattttatagtgtatgatttattgtgttttagaatagttacagtggtacagtgatgaccacccttttagaacccctgaaaagaaactccatattcattaatagtcaaatcctatttttttaaaatattttttattattacatattttcatcaattacatttagaatgctatcccaaaagtcccccataccctccccccccacttccctacccacccattcccactttttggccctggcattcccctgtactggggcatataaagtttgtgtgtccaatgggcctctctttccagtgatggccgattaggccatcttttgatacatatgcagctagagtcaagagctccggagtactggttagttcataatgttgttgcacctacagggttgcagatctctttagctccttggttactttctctagctcctgcattgggggccctgtgatccatccaatagctgactgtgagcatccacttctgtgtttgccaggccccggcctagtctcacaagagacagctatatcagggtcctttcagcaaaatcttgctagtgtatgcaatgatgtcatcgtttggaggctaattatgggatggatctctgggtatggcagtctctagatggtccatccttttgtctcagctccaaactttgactctgtaactctatgcaaccactgatctatctccataaattctcctggtccttttctttttcacattttacataaaggaaatttattgagaatttcatacatatatctagtgtatgttttatctaatccatctctctctatctttcctttaacttctctcatactcccttcaaccacttcacccacccacatctgtgctctgccttaaccttcagagttcagtctgtgatcctagtatatggccttgtacccatgctatgctggcagctctaaggaaattttaatgtaaagcaattaatgtaaagcaattagttttcatcgacttagacttgctgtgctttatacagtgtcctgaagagtgatagaaacagaccaataatgaatttagttaaaaatgggggaaaaaagagaatattttaggagtaaaaagaagaaacagagagactccatcagggtctacccaaaaatagcagcctccacatgcagaaaagggtaataatattcctgatggtgtgattctttgtagaattctgaggttcacagggaaagcgagcggcccaagagttctttattaggaacattggaactatgaaaaaagagagccagactggacttaagaagtagggaaatggggtctggttgtttagagtaactgatagttgcccagtgaaacattcggtataagatccttccagtaaacactaagttatttttgcttcttttgaaatatagaataatatcactacagagaaaagcaggaaaatactttgagagccagttgttcttagaaagtgaattctgtagagacaaagttgttaaggacaagaagagcctccaaaccaaagaataatgaaaagacattgatatgatatcaatattgacaaaactggtcatagcgaagatgataacaatggcattttaaatttttggctacgtgacatagttaacaaaatttgggtatctatggaagaaatgaaaatgacagcagagcctggaggtttggaatgtggatgcactggctttctgcttagtgtcggtgagagctggaagtcactccactttagtgtatcttcagacccccaaaactatatgtgtcattcctttatgtccgactgttttggtttgatttccagtgctataattttgaccaaaaacatcttcagggagaaaagggataatgtggcttacacttcctggtcacagttgatcattggtgaactcagagtaaggaactaaaggtgggaacttgaagcagaaaccaaaaagaatgctatattctcatctgttctttgtcttgctagcaggcttacacttacctagctttctcttacaaagtagaatacctgccaggaagtggcaccacccaaaggttgtctgggccctcccacatcaattagccatcaagacaacttcccacagatatgaatagtccagttgcactggaaaaatttctatttccaggtgactctgtccaatttcaataaaaactgtctactttaggagagtcaaggtgaatagcaaatgaaagcttaaccatctctcatataaaggatttatatgataaatttgggggaaacaaacttaaggttctaatttctatatgctatgacagttgttgggttaaagtcagtggtgaaatttgagcctacttggataattcaggaagcccctctctaagagaagacttcttgaagagcaggtcaaaaagaaaggtaacattatgtataaaagaaaatgaataggtgtgaaaccacctattgcagggattataagcatcttgatagagccacggtgcaattaaagagaatgaatgagcaggaatggatttagggaaccagacctgggaggtttatcctagagaactgttagcaagagtgctgtgagagctttgaagtctgtccctgtcattctgggatgatggagagcacaattaaggtgggtaccacatgaagcttagcacagcataaatagcatagactttgaaatcgtacaaagctgagtcataaggttatttaacttgtgccaatactcggcttttctgctctgcaataggaagctaatatcgcctattctatagcttttgtaaagtgctctagtacatagaaagttcaccataagtaaagcaccagttattattattactgtcatcatcattggcaatagtgctctgttcacggttgtgactagaagaagggagactaataggaaactatttcagttacacagattatggtcatgatgtacaagagacaacagttatataaaagaattgtgggaatataggaagttatttatgtaatttttattcaatggaaaggacatcagtgaaaaaaatggttattcatggagaataaggtatttctgcaaataatgtctttaaaagtgtataaatgggttcaagattaagaaatctgagatctttaaaacaacagtcagaaaaatggacatgtataggtcatggcctcaagaaggacacagagagtgaacaaagtagagggtcgcagatgtggctgacaaggaacaatggaggggactaggaagggcttaataaatagttatgaaatagttatacactctagattttcgtttttaacgtattgcatacatagatcttcaattacttctagaccatttcctgttgttatgctttcaaagattatttcacttttactgctctccaaagcttcccattaactgtgtgacagtgtctgcctagcctcctctagtggagaatgaactcagggtcttgccgaacctctgtcatcatatgcctagttagtctccaaaccctcagggtttctgttttcatgcattccattgtgtgttatctaggctctgtcttttagttttagttttgagactgttctgtcactctcactcacaccctctatcttgctctcgttgaaattaaaggtctccttttcctcagctgttgctacttggactaccctcagctttccttagctgcctgtggttctttgcccagggctgagactcctgaacttttccccttctgcattaaaaagcccattggtgtcattgttgttgattgtccctttaatttgcaatacccttctttttcttagttaaataaaatgtgaagtaaaactatttttttaattttaaagaatccctaagtctttgttccttttgtgccactgctttttgccaccaagttagaaccttttagttaacatttgaaaggcttttttcttaaatccctttgctctttaaaatggcaaatgtagtattacaatgagctatgtatatgctgtggtattatcttttgaactacagagtaaagttctgaacacaacaactctaaaaatgttaatttaatttagtctatttagtgtactgatagaatagtccatttttactggatgactgttttggaatggtttgaggtaacatgatggttgggagaattttgctcagcaaaggttctgtgagtgttgtggtctcagaatctgagcagattggttcttgaatgagcacactttttggaagcttgggatgattgtgcttgtctgactacaaagaaaagcatcaggagtctcccctgtgtccagtgactgaaacttccatgtttgtttctgttatataaacacacatttggtcaggtacataaggaacttcaacacactaaaataccttgttttcttagataaataaaatgttaagtaaaacgtctttttttaaattttaaagaatccctaagtctttttccttttttatgccactttttaccatatatacatatacatacgcatacacacgtgcatatgcacatacatacatacatacatacacacgtatgtatgtataatgacaatttaagaatgcaggaattttgatcacaggaacacagtatacctacagagctcagtggctcaagagctggcaccaacacaagaacccctcagcatgatctgtggacggtcccatttgcgaaacccagacattcatgactctgtttgcattctgactgctgaagttgatctgtttctcagtgtgctgcatcaaggcttggaatcagagatggggatgggatatcctcttcctcatgcttgtgattttgttcaactccgagatcttcaaagtcccctgtgtgtcgtgatgctcagtgtcacaggagtatgtgagtgtggaagggcaaagcatgcacaacatatttcacatagttttctgatttcagtctgttgttggaaattattcactagatgaggcagctcaagggggaagggcatggtggttctgttgatagaatgatttttagcatgaagtctcaaataaatatgttatgggtttttttttgtttgtttttttttttacttttaagctctcctttgggaaaaatctccatgctttgctttttaaaaatgaattttagagtctagattttaagacaacaggcttttaggtgaattgagagtcacttgcaaacactgttctgcgtccttgtgtccattggctctcttcattttcctctgcgggccattagggtttccttgacacatttcttttcagggcccagcactagagactgttctagctttgagagaagaactagtgtgatgtagctctagtagaataacatgtcttatgaaattagagtcctatttcagtgttgagagagagcaagggcttacactgttctctcatctaccttctctgcctcacacagccccagtgacaagagaattctggacaggccagtgtttgagcaataaatgatttgatggtctttattctgtgactcattttcttataaaagtacctgggtttggagaagtaattaaagtttataatactttatggtggggcgtaaggatgggcaatgtgcaaaggaggtcaggggcttaggatatgtaatcagtttccacaaaattattgtgatgcttttgaaaccacaaaatgatcctcatcaagtaagtatctgtcatgacagccattacacacgcactgcagcaaaaattactatgtgagctgaagaaggaggaatcgtgcatgtctttctctttcatagctgcttagtggtttttgtatttaacttgctagagaaaatactgagaagaaaattgtcaagaattcagtaaaagattaaaaaaaagaagaagaaccatcttgggagagaaattggcaagaagttattaaaaagttgggagggaaataagctgagaaatgagggtgttccaaaaaataaattccaccatagagattccacatgactaactgaatttgaatttgacctctggctctccatgttctgcatgactaacctatgagaaggtgagacttaacctttgaatagtcaacttaccaagttggataattcacagctttacagttagaagtaatgagaagataagtgccataggactcagcattgtactagctcagacataatgtatatctaaagaagatatttgaaacacattgaactatgtccctttcaaccagaataaatcacattgactataccgtaccatggactacctataatttactgattatatgtgattaggaaacactagatattatttactataacatgaagccaagaatacttatagaattactgaaccagaactaaatgggaatgccatgatattttatagtctgaactggtatttcactgcatttgagccttggaacttaaaaaatatgtactagctaatatttagggaaagagtatctatggcagcattgtgctaagcacgcgcatgaactggcccatggagttgtctcttctgatttatttagtgatagcttcaccaagagtttgcagtagagtgaaaatatgctgacttcaaaatgcaggctaggctttaggccctaagcgcatgaagttcccgtgctaattatcaggttaacacatcagagttcttaagtcacaaaaaccaaaatagcaccaggatagccactcctagtgagatttgaagtcaacagagcagtagcttatgaacataattataactgtctgaacagactacctcatgagtagactgtgaaactatgacatgtaagcctgaccttcatatttaaaacaaaaacaatagggaaacttacaaagataaaaataattttatacaaatccttattatgtgtttccagtttctaccttttttaaggtataggaaacccagattcagagttctccatatttagatggtgaataatattatttaaaccaagaaaaaatataattttagatgcaggatggtgctccgaagaccctagctaaacttcacattcgtggaaaatttgacattttaccagacttgtaactctatagatgttcacaaaagcttacccagagaaggaatcctggtgtttgctaaattgaatgtgaagtcttctctagataggtgaaatgttctagcattgacagctattagaagtaactccatgatgataggataagtgcttttatttatattgcttattcttggtttagattgatgaattaaaaagaaattgatatcagctgggtatgatggcacatgccttaatcccagcatgtgggagatagaggcagacgtgtctctgagtttgaggtcagcctggtttacagagcgagttccaggacagccagggctacaacacagatggagcctgtagaaagaaagaaagaaagaaagaaagaaagaaaagaaagaaagaaagaaagaaaggaaggaaggaaggaaggaaagaaaggaaggaaggaaagaaaggaagaaaggaaggaaagaaaggaagaaaggaagaaaggaaggaagaaaagaaaagaaaaggaaggaaagaaaggaaggaaagaaaggaaggaaagaaaggaaggaaagaaaggaaggaaagaaaggaaagaaagagagaaagagagaaagagagaaagagagagagaaaggaaggaagaaaaaaaggaaggaaggaaggaagaaggagggaaaaggaaaggaagggaaaggaaagagaaagtgtgcgtgtgtgtgagggagagagagagggagagagagagagaaagaaagaaaggaaggaagaaggaaggaaaaggaaaggaaaggaagggaaaggaaagagaaagtgtgcttgtgtgtgagggagagagagagagggagagagagagagaaagaaaggaagaaagaaagaaagaaagaaagaaacaaaggaaggaagaaggaaggaaaaggaagggaaaggaaagagaaagtgtgcgcgtgtgtgagggagagagagagggagagaaagaagagagagggagagagaagaaaaaggagagaagaagaagaggaggaggaggaggaggaggaggagaaggagaaggagaagaagaagaagaagaagaagaagaagaagaagaagaagaagaagaagaagaagaagaagaagaaagttgttaatctcagcaacttttcactgagctcccactataagcacaatggtgcaataagcacagtagatgttgcctgcaggtataactagtaacttgtctatagtgagatttttgttacaaaaatttatagcaggatggcatatattcattcagtaaatatttttgaatatatgcatcaagctaatgattataccaaactctgggaattacactggtaagaaaggcacaatgcttgctctaaaagaggtttttttttttttcctcatagaaaagaacaattaaagattagcataggttaatgtatcgtatgtttcttagggctcttttatacattaggaagttaacaatgttctcctaaaagatgatggaagtttccccgcaaggaagtgacatctaagtgagagctgaatgaagaagcagaagaacattttaggaagggaacagaatgtacaagggtgcagaaccaaaagaagatactgtacccggcaacgtggggagccttgtgcatatagtagagtaagcatgggcatctgtaaaggaaaggctgtgtgaagaggggcgaactggggaacggaaaggtagtcacattctcagaacccattctgctatactcaggaactcagactttaaagcttaggagattcaccaaaggctttaaagtaggaggtaatgccacacaattacctttttcaaagatgttttcagttataatgtatagttatcatgctctcaattaaatgactagcaaagctgctggcagatagataatttcggttatctatctgagagacagagacagaaggattctccaagtcagggcccaccttgtctgtgtagtgagttccaggcaagctggagctacacagtgagactgttaaaacaaacaaacaaacaaacaaacaaacacaaatttaaaaactattcactgagcataaaatataagatgtaatagtgactatagtcaccatgctacagggtagatctctagaacctattcatcttgtctgagacattctgtcttatgaatacttctctatgatggtgctatttgctgagcaagttgacacaataaaagcattgtgcttcattatggaaatctggaagggatgtagaattgtgatgtatacattctatcaaaatgtatagaaactaagaagggcaaaaagtaggtaaggtatataagtagaatatttgtttaaaatatctaaaacaactaaacatgtaatactcgagctaattgataattaagagaataagcacaactgagtggcaataggaggctccgcggaggggatctcccaaaggctcagtgcagaagagcagagatgacttacagcacaacaaggccaatccatagagcaggctgttagtctgagctcagtacatgaagggcaccttcatttggagaattaagagaatgaaaataagatattacatatgaaaatataaggtcagtgtagtgggaaattaaagaattccatattcgttggaaagtttttactacgtttccttgtggcatcattgctttagaacaaaggacacacttagacaaggatctttgttctcagcttacattttactcaaaggagatagacttttcacaggaaggcagctcttgagagacaagagattagttgggaacttcaaaggtagtggggtttgaagctcttctaagaatctgagttataagagacttcataataggaaccagaaaataatttggggaacatagtctagataacacaagatgttctattgaagtatggtattctttcccccaggcattagagttgtcctagcattagggataggtatagttagaggagaaaataaggaattgtaccacttaaatatccatactgccaatgccataggagttatttagagagtttccttgcatctgagctcgtgctatccagaagtctatgactaaatgagtctgaatgaggcataataggattacagacactgaatagcatttgaaaggatttttggctggctggctggctggttggttggttggtttcatttagtaaaagccagagaaatccagttcccatatcattctctagctgtaggggagttcaggaatcccagcacttttctatttctggacactctttccctgcacacataaaatcactgcactctacagttcctctcttaagaatgcttgagctatccattctgaatataaacccagatctataacacaaggaagtacacaatagcaatagctatatttatattcatacatacacacatgaaaactgattataaaacagtttagtttgtgttatgattttatacacacacacacacacacacacacacacacacacacacacatatatatatatatatatatatatatatatatatatatatatgctctcttctgtatgaggatgtgtgcatatcatggtaaatgtgtagaggtcagatggcaacattgggtactgagctttactgtctaccatgtttgaggcagagttgttccttttgttgctatatacactaggctagttggcttgtgagctactggatctcaggcagttctcctgctctacttttcatcttccagtacaggcataatgggattacagacactcagggcgtctagttttaatgtggatcctggggatccaaactcaaattgttgggcctgtgaggcaggtgctttatcccactgcaccatctttccaggccagagcctttagtgttgatggcaactactataacatcaatatttatatttttctttgttataataaagatgatgttaagtgttttttttttctgctataaacttggttactattcactggtgaaggtaaatctttttatctttaaatcgatgaaaaatcttacaccaccatcctttttagcagagcttagtcttttgaaaatgtttcttcatgcagctatttgtaataaagtttgacttatgtcaacaacctatcttatttattagacataagccaatttaaatgagctccttagtgtctgcattctgttatgaggcttacatctgtggatctctgtcagagtctactaggtatctgcttaccacactcaaatgtacaataagctatgtagaaatgatcactagatttttctctttttccagtgctttcttggctgcccattttcccatcctgacttcttcctacctgtttttcctacctttctcttccattggctatcttctgtatgcacaaaacaaagcagtgttttgtgctttttaagccttattaacaatggcattaactatccagtgattcaccgttagagatatgctttattgagcagcattcccctgaagttaatgttcccttaaccctggcttctcactgtgcccaccctcttcttcccacaagcgtctgtattgtcaaggttgttctaaaaatgataagccagccatataaaagtttatggtattttcctatcttcaaagctacaggaagctcaaataaactcagcaaatattgctcaattacacaagactattaaatgtaacaccccacccttctaaaaagcacctcctcttctatatctttcccttttctttcttagtataacagcctagatcattatggctctattgtgtgatcaggtcagagcaaatgaggttcatattaacaagtttccttaataacttctggcttgtttgatatagttgaaggataccaagatgataaattctaaatttctaagagaagtcagtggtaaatgtgaataaatggaacataccacaataagtatgttctctagtccttaatgataaagtaagttaatctttattgcacacttattatagtattactttgaccctctccagtgtgcttatctcagcgttttcaagtgttttacaacctcaaacacacacattgtgttgtgtgcacagtctgctttgaagttgacatttgcctttctgacgaggctgtaataaaggaagtcaaccacctgagagaacaagtgtcagatgaggatttcaggccctggcgagcaccgctgttcagggttaagtgcagaaacccaggttccttccagatgcctttgagtcaccacaggtgcagcaattttaaacaaataaagtttctgtgaattagctcaagagcctcaccttagtttggcagatatttgatgttatttgtagataaactacaccgaaaaaataaataaaatatcaaaaaattaaaataaattaaaattgggaatagagaataatttgaaagaaaagttaataatgttctccttctataagagtagtctttgattacataagtttatatttcaggataagacagttttcttttattaaacaaaattcttctggacacttaataagcatgtgcaagggcctctatttcatccatagcaccaatttaaaaaaaaaaaaaacctaaacgaaaatccaacagctaattttatagaatattttatagctaattttatcgtcaaatattatctaatacccttgtctaggacccttattccaatagatgcatttcttcaaggagttttatggataaatgcccctcaccccccaaaaaaaatttccagagaattttcagtattaacaaagaaaagtagcccctgtagctgtgtgccaggcttcctctaaaagccacgtgtgctcgtgcagcattctaaagagctcacaacacaccctaatggatggtcatgtacccatgctcatactgggcaacactagttgaactaaggggattattgataaaaataaaaagacaaggtttgagtaagaatggggtaaggtgtagaagggggcgttagagggaggaaactgtgggatttatatgatcaaagtgcattgtataaatgtgtggggttttcaaaaagaatatatgtatatacatatatttcaaaaagaatatctatgcattatctatgccattaacaaaaaccaggaaaaaatggaagggatggatgaggagggtttgcagggagggagggaatggataaatgtaattatgttatagtctcagacataaaaataaagattaaaaacaaatcctcatgataggcacgagtgatataacagtttttaaattgtgatttttacaggtggggaaaatctatgaagtctgaaaccaacacccttaagataaatatattaccagatttgagtatccttagtagtcagcaaaggtcaatgtttaacgatgcatgcaaaacagagtgctttgttttaaatcaaacagaatgttaagtactcataaatttgcagacggatgaggcataaactgagtaatcaaaccaagtgctcagattaaaggaggatattggcgtgctgatgtattaggctgtaatgagtgcaatctcagtagatccccgctgcctgtccctcatttcactctcagcagcatgaaatcttcactcacggagtgaaagttacccatatttctcttcacgagtggattcagtccataaacaacagttcaaaccttggctcagtaggcagatctactttcataccattgaaagtcaattcctagaaataatatgttatagaagagaacatgtatgtctcagtgttcttattttgttcaatgttaaaagcctggatagcatcaccaaaactgtgccacaaaactctaagattcagcaaatagaataatgaaatatgtatttttccaatccatttaatacaagttacacccatatatgcagttcagctttaaaattcacatacagtataatttgcacacattattctctaacttattcagttcccgttatctttttaagatataacaatacctatatacatgtttatacactaatttagggatgagtgagtgtgtacatgtggcagacggctcagatggaggtctgcagtgtcagtccttcatccttgacggccattaatgagtgtttgctgggaggagaggtccttggtcctgtgaaggctccatagatgcctcagtgtaggggaattcaaggtggggggaggtgggagtgggtgggtggggggagggatactatcatagaagggggggtggtatagggggtgtacgtggggggggaacgggaaaggggataacatttggaatgtaaataaagaaaaatatccaataaaaaaaccttcctatcagtgactttaatctttttggtcattctgactcctaaatcaaaatttctattattttgtctctattctatttagatgaatatgtaagagattataaatatactttcatgtttattaactatcttgatttcctaacatttaaacttgaacactttttgtaagatataatgatggataaaatatgtattatatagatcactgctataggaaacaattgaatgaagagtccagttttgttttgaagtccttaactgagtttgtcttgagactacctctacattcatgaatgtttccggcaggattactaaaatagatttctattttgaaaacataagaactattagctaatttttgacataaaaatcaccaagctgctttgccaaattctcccttggactaaattggtataatattctcccataccaaccatcaatcctactttaggatcagagttgcagtgggctcttcagactgcccatctatcctatgtgtttccttttccacagtatctcccccaattaaactcttggacatttgatatcatgttggaatctggttggagaattttgactgatagctgcatatattacattatcatcttctgtagtgatagtttttcttataattttatatagtcaattttatctaaatgccattttatgttttgacatttctgacttctcttaaagatgttcgttagagcaaaaaataaagacattctgtcctaatagttttacattttcatttatcaagaatatgggttattagaattatatggtgtgcagttttatgttgacattttacactcttaattaaaatataatggctgcttttcccgctccccttccttccctccattccttctcatgtcccttctctccaaacccttccatttcacctctctttcaaattggtgtcctctttattgttgttacatgcatatgcataaatatgtaaatactcatatcttagaattagccaagggtggtttaactagatggagggcatgctcaatagtgagatttttctatttaggaaagtaatgtgatatatcttaatcatagaaacttttaatatcactcttcttcatcctgatcaaagtggtcagaatacagatttctagatttctttgaacaaatctactctactttgaagaaatttagtccactgctgtttctgttgaaaaagaaattgactttgcatgttagctctatgatcaaattgtagacaaacatttaagataactagctcttccttacagaaaagtcatctaaagatataaatgggaaacaactattcagttcacaataatggcaaaccttaaagtatttagtgattgttatagctctcatgggacatttacagaatatgaagaaaatgataaatcttattgaagtattgaattcaacatctgaatcaggattaaaaaacattttgatttagtgttgcaaactagaattctatgtaagtgcaaggtatttaaaagttgcaaataaattctaataaggttatcttaaactaaacttaatataaaatcttagaagtaatttattgacaaattattttggtggaatttttgcttcatcatatgtagacttgatatcatggtatttgtacttcttatatttgaaatgttagtgaggaagaattactgcattaaaattgttcaagtcagcacttgagactatgttagctcatcttttaatgatatattatttcaatagttgacatggctactatgtcaaaaactaagaaagccaactctttcatgaggtaggattatattttatcagatattaaatgatatataattttatttaaaatcaaggacccaaaagtccagaaaatattaatatagaaataaaaaaatggatcagaaaaataagagaacccagaactaggaaccatgacagatgatagaggcatcagtaaaccattcatttgatgattattgttgccttgtaacaaatgaaagatagggtagacaaatagaaaactgtgccataagggttttgaacattttattttgaaaatagtattcaagataacacatatagctagctggtggggagtagatacatttatttcacaaaatctttttgcacatgataagtgatatgcacagtgaaaaaaagagaaacgaatggagttttttatatgcagcctataaagttgcaaaaactacatacaaatattagacacttcaaagaagaaaatgcaacacagcaaatatttaaaatctttgtgattaagaaaaatgtaaatgaaaagagaaaattagcaaaaattatcataatcatactagtacaacttagtaaattgtaatttaactctttagttgctttgtaaagcaatctggtggtaacttttgaaagtagaacatatgcatttgatatagtcatcctactcatgagaatatatcttccagctacagatcacaaaagcatatatgtattcagtgatattaatagtaggctttgtagggaggaagtggggagcaattgctagggaagaattgcatgcctcaccattttaatgtagtctggactacaaagagaaaccaatgacttcaaatgaaccacctggaagcagcttgcatggatcagctctcttgtagtattctgttctcacagtgttgtaagtactgaaacatttatttttctgagtgcctcaccttatagtgtgtcactcagccaagagtatggggattacaaacactgtttgttctagtggaaatctcacatctgtcattacgtcatcatcttcaaaacaggagggagtgttttagagacgtgatggtagtgaacctgaatccccttcctttttcctttctttttaaaaaagcaataaggtaacagaggaaataaatataaaattgtatttactcttgtgaaataaaatcaccaacaatctgtgctagctagtttttatgccacaggtagagttttatgacatgagctagaataatttgggaacagagaagttcaattgagaaaatgcctcaccagattggcctgtggacaagcctatgggaaattttcttggttgaggattgtgggaggtcccagttcatgatggttggtgccacctctaggccagtggtcctgggtgctataagaaagcaggctaaggagccacatggagcaaatcagtaagtagcactcctccatggcctgtgtttcactccctgcttccagattcctgcctgagttcctgcactggcttccctcagtgatggacataaaagttgcaaaatgaaataaaccctttcttccccaagttgcttttggtcctctgttatcacagtaacaaacaaacaactaacaaagaccccatgtctgcaatggtgtatgtgggaagtcactgatttatcccaagtctttggtcacgctgtcaggaatgcttgttagacggggttccttgttaaaagtgaatagcatggcaatctaaggaggtgatagaaaacatgagagggggctgggaggagagaatattaaaggaaattggtacctaacttgatcacattttaactactcaagtgaagctcttcatggaaggcctcgaacattctctctgtggtgtgtgctttattcctatcgtctaaataattaacatgccatgtatactgttgtataatacgttgtaaaattgttttttaagaagttagattgttacttaattctcgctccaggattagagcttatcttctaaattaggtttacactgtctggagtcctggactatttcttacaaacccaggtcgtcttttactgtgccttcatagttgttactacagaaaagatcattattgggcaaggaatggcatatgtgacaggagaggagtagtaagtggacaaggacagaaaaataatggaagtggtgaggatgtttgtgttgttgtttgggaagatgaatgaaagaatgcggaaataaactgacatgtcccgttgttagccactgaagaatgcagaaataaactgacatgtcccgttgttagccactgaagaatgcggaaataaactgacatgtcccattgttagccactgaagaatgaggaaataaactgacatgtcctgttgttagccactgaagaatgcagaaataaactgacatgtcctgttgttagccactgaagaatgcagaaataaactgacatgtcctgttgttagccactgaagaatgcagaaataaactgacatgtcctgttgttagccactgaagaatgtggaaataaactgacatgtcctgttgttagccactgaagttgcctgcatgtttctgtgggtgtggagagttttgttttagcttttcttattaacaggcttattcagtcttttgacattttttaaaagtgattttaagttgaaagtatatttgaatggcacttgagtttatatgatgggcttatgggtagtctttgaatataaacattccccaaataaatagttgcatctgaagaaaaatgttcttttcaattttggattgtgcatgctaaattttatttctggtgttatgctttggataataggacatcaccaagtttgcagaacaagacaacacagttcttggagaaggtggagtcacactgagtggaggtcagcgtgcaaggatttctttagcaaggtaaatatttaactgttggtcttgtgagcacttgctgtaaatactatgggtttttaattatacatacacatttctcttctgcttcctgttctgtctctggaattgatgctttttctttaagaactatagacattataatattcaaatttggtaaagatggtggtttttttttttcaaaatgtatacttttcaaaatgtatactcttatttatatttgtccaaacttgttgttatggtgcatggattgttatgaagagaaaagtatagaattctaaagaaaaaaagaaaaggaaattacaagtttctattaatcccccctttttccctgtccccagatgcctctgatttgaatttctgtttattcttctaagtttagatatacacattttcaatttttaatttttagaacataatctatgatagtataacaaaaataggaaggtaaatgatgtcactaaggtttctcatttgtttacagacaaaggacaaggtctccctatttagaaattaggatctttctgtgtttgtttctgtatactaggatgaaagtgtgtgccaccacacccggtaagctttatactgaatacatgctttcatttgtgatgctgattgtcctcatggtcatgtttaattattgtcagaacgaaagtattttatttaaattgtagcttccgtttaaagacaattggtggtatgggatttcaaatgctctctaattttattgaaacaaaattcttactacattaccaaagctgttaatgagaaattacattggctcagtggtatcttggtatcttggccatttatcttccatctcctggaaaagtaaacactaagtatcacaactgatccttgataccattccttctccccctccctttgtctgtgtgcctgcctgtctgtctgtctctgaatgtatgtttatgatctcaatccccatacaagactagaagcagaaattgttttctttattttatggaagaaatcacaagataattgaggtagtcagacattaacttgccaaaggccacaaggaaatgatacagtcactatttaatcaaggtcatcttgactccttacattaaactatgcttcggtctggaaaatacactgcgaaatcagatcaatagatagaatttccagacaatggcttcaaaatgattggaagctaattcccttatctgtgtggcaaaagtcatatcttaagcattccatttgagttttaagtaaaatatggtatgtgacttcagtatagtattaacatttactagtttaagatttagtcatatttgctatgtacaatatatggcactactcaaaacagttgtctactatttttatagttgcacatgttattctcatttacatatgcaataaatatgtcatccacttttatatgaagaatatacacattttaatcttgagaaactggccacacatgtgaatgagagtttttaccttggttttgcactaataatttaccaatatattcagagtaaattttacagaaaatcactttttattcccacttactgtttaaggtaaaggagtcatatccagtgatggcttcttgttggcagagtcttgagacagcacacacaaaaaaatcatatgtcaagaaaaaaaaggaatgtgtgtgtgttctctgttattcctttcctcatgaagccaccattatccaatcatgaaaccccaccttgataatcttacttaatcctcatcattttgcaaaatgaccaccaacagctttgctgttggactaagtttccatcttcttcctgcctctgatggatatgaaatctatattagtttcagaatggacaaatatatttgattatattacagagaaataaataaaatctaaatgttgataaagacaggagagttcatttttatggagtccattagctcttctgtttccttccagacaatttatagcataaagggcttgtttgtttgtttgtttatttttattctttaatccttttttacagttcagaattcatccccctcccagtctgcccccgactgctccccatcccatacctcctccctacccctaacctccatcgccaagaggatgtccccaccctgagcataaaagagcattatgacttaatctggaattttttttgctatttctattttattcattgtttttcttatttgtgatgattaagtacattttaaaaacaaaagtatcaataaatagtttctacagcatgtcctctgtaactgggatagaggtagcattattagtaatcacacttgaaaaaagtaagatgtataaagaaattatttcctttttgttagtttggaaaatatacctttatatttttcctattgtaagtcaactcaaattgtttttagtttcaatttcaagtgaaataagagctggggagagatagctcattggtgaggagcgctggctggtcttccaaaggctccaggcttgagtcacagtactaatctgcttcacaatcatctgtaattggtaacccagcacacctgacatttccttttggtctccataggcactgaacacacatggtacacatacatgtaggtaaaaaccgtcaaacacacagtacagaagttactaacagtactccctgtgctctgtgctgtgacacgtgtgctttcagtacatggttttgatgaccattgtataacacaagttctgtgtttaaaatatctattctcaatgacgtaaaagatcttgagggatcctaactttctttccattttgtttatagagcagtatataaagatgctgatttgtacctattagattccccttttggatatctagatgtttttactgaagaacaagtatttgaaaggtatgttctatgactgagttacttataatgctcatgttaaaagataataaatgtctgtttcaccaaaggctgcatattagcatattagctccagagtaatatccactatttctattgctcaaaacatcaggatctagcacagtgcttattcagtcctggcatccccttaatggtcaagggtgaagttgcttctgccacacccttttctgatgatcacatctgaagccaatttcttgattgctatcctgttctaacagttgatatttaagaatcgtttatattttgctatcttgaaaagtcttccagtattttaagtagtttacttttaaaattccacctaccattctgtattagtatttttattttatgttgttttagaaagaaaataatgtttattggtaaatgcccatactgtacctctgtcttagtcctctttagatgcccctctttggtcacagagaacatagatatttccttaaagtttttattagagcccaaatgggtgtaaaatctctaagaggtaacattagttataccatttgatttcaaatgttaaaataattttatgggcaacaaagtagcttattagaatagacattatagcactctagaaacaaatgagtttttgttttaaggatagaatgtagtgtgtgtgttaagatggtttgattatttattgatttatttcaaacttttactttaggacattgtgctaaagggttgaaatattctagagccctgcttattgtgtcttaaaatatgtggaataacatgtttcactaatggactttactgtacttacacatgaagccagcaggtctcagtcctgaagctacttttattcagaggtggaatactatggcatgtttgttttgacattttccgtttacgtttctgttgcatggtgtttattagcatggtttatccggccacaatcccaagaacatcgtgatctctgaatgaagggccaagtcccaacaatgccatctctagcccacagatcccagtcctcattgttgctcataagcttccgatcaaatctatagtgaagaagtccttatatgacaatgtattttcatagttcccttcatcttctcttgcttattctaatctaatgcaaacggctgtagaaggtcctagtacatttctgcctcccgcaaagctttttgcatctccttcactacagctgtgcattaacattgtcttctgagtctctaaagttgttttgtaattcccattgcatcaagttctctgtgtccattacagtctgaatgctgaccactttaagcatataacactctgtaagacaaacattttcttcttttattctttcttttttctctttcttttttttttcttttttcttttttttagatgcaagctggctctcttttccctgatgattctcaatattatttattcttcaacttgaggttaataatcagagagagcctaaacattgtattttatttactaaagctacatcattaaggctttgataattgttaattcatttatttattcactttacaaaactcctctcctcccagtatcaccctcacaaatttgcccccccccccccatgagtcttctcagagaagaggatgtccccttggccgttggatacctgccagccatgggacatcaagtcacagcacaagcctatcctttcccaatgaggcctgactaagcagctcagctggaggaaggtaattccagtggcaggcaatagattcagagacagccccgctgcagttgttaggggacccacatgaaggccaaacagcacaactgctacatatggtttagtctctgcaggctctctggttggtgcttcagtctttctgagctcccatgggcccaggttagtatactctgtaggtctttgtggtgtccttaacccctctacctccctcagtcctatcccctactcttacaaaagactcccccaaatctgcttaatgcttggctgtggatctctgcatctgtttccatcacctgctggatgaagcctctaaagagacacatttgctagggttctatgtgcaaacataatatcattaatagtgttgggagttggctctctcccatgggataggtatcaaattggaccagacactggtgaacttccttcaatctctatattttttagtatttttttttatattttattatctgtaatcatttttttaaagtgcagtcgttatccccctcctgttctgccctctgacagttcttcatctcattcctcctcccctatatccaagatgatgtctctacacccccacacatgcccacaccgcaccagacctccccattccctggggcctctcaagggttaggtgcatgcatcttctctcattgatgccagaataggccatcctcagatgtaaatatgtttcccaactagtgtatgctgcctggtgggtggctcagtgtctgagagatttggggaagttcaggtttgttgagacagctagtctttctattggatcaccctcttcgtcagattcttccagcctttccctagttcaaccacaggggtccccaacttctgatcattggatctgcttctgtctcagtcatctctttgttgggcctctcagagggcagccatgctaggctcctgtttataagtacatcatagcatcagtaatagcatcagaccttggagactcacgctgagatggctcccagtttggaccagtcagtggacctcctttccctcattcttttctccatttttgtccctgcagttcttttagacaggaataattctaggtctgagttttggattgtacaatggcaaccccatccctccatgccctgtctttctactggaggtggactctataagtgctctctcaacactgttgggtattttacctaaggtccctttgagtcctgaaagtctctcacttctcaggtctctggtatattctagaaggtccccccacatcccacctcctgagttgcctgttttcattcattctgcttgccctcagtgcttcactcctgtttcctaccctgctaatacctgaacatgttatgaaattcttaggcaaatggatgtcctcattcttaatagctgcctagtattcattgtgtaaatgtaccacattttctgtatctattcttctgttgtgggacatctgggttgtttacagcttctggatatcaaaaataaggctactataaacacagtggacttgtagcatggtgggacatctttttggtatatgcctaggaacagtatagctggctcttcatttacaattatttctaattttctgaggaacctccagatttatttccaaagttgttgtaccagctagcaatcccaccagcaatagaggagtgttcctcttattccacatttttgccaaaatgtgctgtgacctgaggttttgatcttaaccattctgattggtgtaaaggtggaatctcgaggtcattttatttgcatttccctgatcaaaaaggactttgaacatttctttaattgccattcaaaatttctctgccgtgaattctctgtttagttctataccccattttttttattggaagtttttttgtggaagttagcttctttagttctttatatattttggatattagtcaactatgagatgtgggattagtggagattttttccccaatctgtaggttgccaatttgtcctattgacaatgtccattgccttacagaagctttacagtttcatgaagtcccatttatcaattcttgatcttagagcctgagtcattggagttttgtataggaaatccccacccacaccccctaatccccaaatttctccccaacctccatggccatgagttcaaggctctttcccatttttcttttctgttagatttatcttatctggctttttttgttaaggttcttgatccacttggacttgagctttgtgcaaggtgacaaatataaatctattttaattcatttacaaactgactcccagttagatcagcaccatttattgacggttcttttttacctttgtatattttttgcttctttgtcaaagatcaagtatccataagtatgtgcttttactgttgggtcttcaattcaattccattaatcaactgatctgtctctgtaccaaaaccattcaggtttgttttttgttttttgttttgttttgttttgtttttatcactattgctgtatagtatagcttgaggtcagggtgatgatttcctcagaagttcttttattgttatgaattgtttttgctttcctgtttttttggtttctttccagatgaaattgagaattgttctttccatgtctttgaagaattgtgttggaattttaatgggtattgcattgaatctgtagactccttttgtaggatggccatttttactatgttaatcctaccaatccatgagcatggaagatctttccattttctgatgatttctttcttgagagacttgaagttcttgtcatgcagatctttcacttgtttggttagtttccccaagatattctctctctctctttcttccttccttccttccttccttccttccttccttccttcctttctttcttcctttctttccttctctatttctttctttgtttctttctctcattctctctttttttcttttttctttttttctttctttttcttttttttttcttttttttttttttttttggtgtttccctattttcattctcagccctgtttatccttagtataaaggaaggctactgatttgtttgagtaaattttacattcagtcactttgctgaagatgtttgtcagctgtagaagttctctggtaggattttggggtcacttatgtatactatcatatcatctccaaatagtgataccttgactttttctttgccagtttgtatccccttcatctccttttgttgtcttattgctctggctagaaccttgaaaactatattgaataggtatggggagagtgagcatccttgtcttgttccttattttagtgggattgcttcaagtgtctctccatttaatttgatattttctgttggtttgctgtatattgcttttattatgtttagatatgggccctgaattcatgatctctccaatacttttaacatgaaggcatgttatattttgtcaaatactttttcagcatctaatgggatgatcatgtgatttttttctttgagtttgttgatatagttgattatattaatgtattttcttatattgaaccaaccttgcagccctggaatgaagcctacttcattgtggtgaatgaccgttttaatgtgtgcttagattcagtttgctttatgagtactttctgaagttcttttgttgttgttgttgggtctgtgtatagtttagataacagagtaattatgtcatcatagagtgaattaggtagcattccttctgtttctattttatggaatagtttgaggagtgttggctcttctttgaaagtctgtgtgatgccttcttagcagaaaggttgccacaaaattttacatgagtctttctatgtggtccagagcacaaagtacctttgtctgaattacttgttcaaatcttccaggagccactgtactgtttttgtttgttcagttgttgttttcctttatatataataattttagcttcacttgtttggggggagctcctttgtatctgtagaacctgcatagtgccagaaatatgaactagcactgtagccatatgcatttcagaagtctgtttccagcaggactctagtttaagacaaagagaaaattccattaaatgaaattccccccttccccaatgctatttttatgatgctctgactatagttgccaatgtttactgtcataaacttacctaaaattatattatttatacttaagagaatttaatggttcttatttttttatattttaatggataaaaggaacagattttccctgtagtatccactgcaatacttaactttttttttccttttccattttttattaggtatttagctcatttacatttccaatgctataccaaaagtcccccatacccacccacccccactcccctacccacccactccccctttttggccctggtgttcccctgtactggggcatataaagtttgcgtgtccaatgggcctctctttccagtgatggccgactaggccatcttttgatacatatgcagctagagtcaagagctccggggtactggttagttcataatgttgttccacctatagggttgcagatccctttagctccttgggtactttctctagctcctccattgggagccctgtgatccatccattagctgactgtgagcatccacttctgtgtttgctaggccccggcatagtctcacaagagacagctacatctgggtcctttcgataaaatcttgctagtgtatgcaatggtgtcagcgtttggatgctgattatggggtggatccctggatatggcagtctctacatggtccatcctttcatctcagctccaaactttgtctctgtaactccttccaagggtgttttgttcccacttctaaggaggagcatagtgtccacacttcagtcttcatttttcttgagtttcatgtgtttaggaaattgtatcttatatcttgggtatcctaggttttgggctaatatccacttatcggtgagtacatattgtgtgagttcctttgtgaatgtgttacctcactcaggatgatgccctccaggtccatccatttgcctaggaatttcataaattcatttttttttcaattttttattaggtatttagctcatttacatttccaatgctataccaaaagtcccccatatccacccacccccactcccctgcccacccactccccctttttggccctggtgttcccctgtactggggcatataaagtttgcaagtccaatgggcctctctttccactgatggccgcctaggccatcttttgatatatatgcagctagagtcaagagctccggggtactggttagttcataatgttgttccacctatagggttgcagatccctttagctccttggctactttctctagctcctccattgggagccctatgatccatccattagctgacagtgagcatccacttctgtgtttgctaggccccggcatagtctcacaagagacagctacatctgggtcctttcgataaaatcttgctagtgtatgcaatggtgtcagcgtttggatgctgattatggggtggatccctggatatggcagtctctacatggtccatcctttcatctcagctccaaagtttgtctctgtaactccttccatggatgttttgttcccaaatctaaggaggggcatagtgtccacacttcagtcttcattcttcatgagtttcatgtgtttagcaaattatatcttatatcttgggtatcctaggtttggggctaatatccacttatcagtgagtacatattgtgtgagttcctttgtgaatgtgttacctcactcaggatgatgccctccaggtccatccatttggctaggaatttcataaattcattctttttaatagctgagtagtactccattgtgtagatgtaccacattttctgtatccattcctctgttgaggggcatctaggttctttccagcttctggctattataaataaggctgctatgaacatagtggagcatgtgtccttcttaccagttggggcatcttctggatatatgcccaggagcggaattgctggatcctccggtagtactatgtccaattttctgaggaaccgccagactgatttccagagtggttgtacaagcctgcaatcccaccaacaatggaggagtgttcctctttctccacatccacgccagcatctgctgtcacctgaatttttgatcttagccattctgactagtgtgaggtggaatctcagggttgttttgatttgcatttccctgatgattaaggatgttgaacattttttcaggtgcttctctgccattcggtatttttcaggtgagaattctttgttcagttctgagccccattttttaatggggttatttgattttctgaagtccaccttcttgagttctttatatatgttggatattagtcccctatctgatttaggataggtaaagatcctttcccaatctgttggtggtctttttgtcttattgacggtgtcttttgccttgcagaaactttggagtttcattaggtcccatttgtcaattctcgatcttacagcacaagccattgctgttctgttcaggaatttttcccctgtgcccatatcttcaaggcttttccccactttctcctctataagtttcagtgtctctggttttatgtgaagttccttgatccacttagatttgaccttagtacaaggagataggaatggatcaattcgcattcttctacatgataacaaccagttgtgccagcaccaattgttgaaaatgctgtctttcttccactggatggttttagctcccttgtcgaagatcaagtgaccataggtgtgtgggttcatttctgggtcttcaattctattccattggtctacttgtctgtctctataccagtaccatgcagtttttatcacaattgctctgtagtaaagctttaggtcaggcatggtgattccaccagaggttcttttatccttgacaagactttttgctatcctaggttttttgttattccagatgaatttgcaaattgctccttctaattcgttgaagaattgagttggaattttgatggggattgcattgaatctgtagattgcttttggcaagatagccatttttgcaatgttgatcctgccaatccatgagcatgggagatctttccatcttctgagatctgtaggaaaatgttattggaggacagtcaactttattaggtatttctcagttgtaatgttttatcttaaagaaaacagattagtcaacataaaatataagagaaaattcattaaaaactaaaaatagaaaatctctaacatcttagaagttatatggacatataaactttaggaacatataataattcttttattttctagaaaaataaatcaagaccaaagagaaaatgatttggttaaaatcagatacttgattatttaaaattgtatttgattttatgtctgctagtatttactttacagtaagatatgctatttcatactgcaattcatgaggcacctaagagttatgatggagtggttatttgtataagtgtattaaataaagcaataaaatgctatgatagattttatgcaatgaaactttatgctgaagttaaatatacatcactatttatgaagtaatatcttatatcttttttatatttccaaagctgtgtttgtaaattgatggccaacaaaactaggattttggttacatctaaaatggaacacttaaggaaagctgacaaaatactaattttgcatcagggcagtagctatttttatgggacattttctgagctacaaagtctacgtccagacttcagttcgaaactcatggggtatgatacttttgaccagtttactgaggaaagaagaagttcaattctaactgagaccttacgcaggttctcagtagacgattcctctgccccgtggagcaaacccaaacagtcgtttagacagactggagaggtgggagaaaaaaggaagaactctattctaaattcattcagctctgtaaggaaaatttccattgtgcaaaagactccattatgtatcgatggagagtctgatgatctccaagaaaagagactgtccctagttccggattctgaacagggggaggctgctctgccgcgcagcaacatgatcgccaccggccccacatttccaggcagaagaagacagtctgttttggatctgatgacgttcacacccaactcaggctccagcaatcttcagaggaccagaacttctattcgaaaaatctccttagtccctcagataagcttaaatgaagtggatgtatattcaaggagattatcgcaagatagcacactgaacatcactgaagaaattaacgaagaagatttaaaggtatatacccgtcaagtcttaagatacatctcatcctaaccccataattggagtaaattttgtcacatactatgtatttcatggcatcccattgtggtctatgggctaaggatacaaagtccattacctgtgtaagcaacttgaaacataaaactatttctggttatcattgaaatatcatccccaccccacaaatgtgtggtaagccaaaacagggcctcagtgttgagtttttctactagactcatgaaatgatattcacttttataacttaataattgtctcctttagtgtttttctaggaaaaggcggaatagagtattatataaacaaatacttgcatttatgtagacaccaaaaagtgtttttaaggcatggccttgataaggattacacacacctggcttcttgacaagataaattcacattcctgcctgcatttagttagcatatattttctaacctttcagatttgtgttgtgttttttaaagggtttctctaaggaagatatgtgcagctcggcatatattagtgacagtagtcagattaaagttcttaactctatgtgttaaggagcaaaacgacctctcttaaaatagaaagcagtggaaaacaagagggcgattgtttaccagtggatgtaccttagatgaagttaaagcagagtcctagtggatgatatatttaatggtgactgtctttaatataaagttaacttttgggcagttgcaattcatttagtatctctgggcctgagttcactctgttgtgaaataaaggaataagtaattctcaaaaatatatgctcgatatttctataatctaaaactgatttgctaaaagataattcatctatatgatttaatatccatctaaataaaattaccaaattgaagtatatacattttggtttgtgtgcattttaaagaatgctttctttacctgattttgttactaagttatcaattatttcaccttccaggcaacacactttttgtctccttcactgtgacatcattgtccctattaacaaagaaataaaataaagttctgagaaattcagtatcttcatacattcaaacatcctacgatgttaccatttggtcttgattttaaataaagggcagtttagttcaacaatctaatttttaatcagtaaaccttattccaggttaataggcttccttctttgtgagtctaatggcacttaatgaacttcatggattttatgagggcatcgtttccctttagaatatatagactctctttttctcacatttttataatgtagcttccaaaagacaaaggcttttagaggctgtatttggaattggattttgtaacttaagttgtagctagaaaagcaaccatgtaatgcctaaggactatacaaatataagccagcttctaaaatagaagactcaagtagctagcaaattctacattgcccttgtctctggctcactgaatcaagctcaatcatgaagagtttgggagcttcactcatttgacaaaaggtgtgggctgtaaagcatttacatgctaaggtttgggaagtctcactgtgtttggtactttataaactatattgcttgagcagacatcctattctctgtggccatcatcacccgtggcatttttagtggcttttattttttaaagatccttggctgtaaatggtactgttcccttatttccctgaattcataataaaagctcagtggcagcatggagtaggattgtctcagaatcacacttcttttctcaggagtgttttcttgatgatgtgatcaagatacccccggtgacaacatggaacacatacctacgatattttactctccataaaggcttactgctagtgctgatttggtgcgtactggtttttctggttgaggtaagtatgtttgtttggaaattgtcactgtgagtttaaatttaggataaaaaagctgtatgtattcatatgagcatgtacacatgtgtatgtgcatgtgtacaacggtagtttcctgtaaagttcatcgcttctgaaaaccaagaggagctgacgaggcagctatgtggttaagggcactggttgctttcccagacaacctagccaaattcccagaccccacatggtggtttacagcatctgtaactgaagtctcaggaacctggtactcttttctggcctctgtgtgtacaacatgtgtgtagtacacagatgtgtgcaggcaaaacattcatacacagaaaaataagttaaaactttttaaaatccacagttagaattactattgatattttagtacttcagacataaggaaatatgcataaatacaaatgctatatatgatgaattgtcataaaataaaatttattgggaatattttttataatcagcatattttgattcataagtattgtaaagagattactataacaaaatcaataacataactatgtcatctcaagtaacattttttgttgtttttgtgacaaggggtcctaaaatccacacatctaacaagtaaaataatagtttgttatttataatcctcacatcatttattacacctccatacatttagtttttaacagattcagaagcccaacctacaaagagtgaatatgagttgaagttaagtactgaaaagaattctagatgtccatctagatgatctaatgaggcaggcagtgactcatgtggtaatgatccttacttgcctgctgtacctttgtctcaggcagtgttcatcgagggaagctttcacaatgatgtaattacttcattgtgtgctgacctgctgcacaagaatgcagtattagtcactctattatttttcctgttgccatgataaagcacctaaaagttaaggaaaggagatatatatgtgctttctgtttgagggaacatattccacagaggctgggaaggcatgatagcagaagtagcaggttggtaggtcatattgcaagcacactttggaagcaaatagtgaaaaagtggggccaggctgtaaacctgaaggcctgctcaagaaccgaaggattccatagccttcctaaacagcacagtagcttgagaccaagtattcaaacacaggagtctttagcacattttacatccaaatcatcaacagtcacctgaggggaaaaaaaagacattttgggaaaggaagtcaggggacaggggcagggttcatagtggacaaaattcaatgatgcacttgtcagaaaacaatctaatggtgtgcttttctttcttttcgtcttccttccttccttccttccttccctccttccttccttccttccttccttccttcttttcatttttgtcagtatcttataggcattgtccagttaaatagctctcaaatgctagattaaaagaaagcaatgatatgcacaattttacaactaaacaacatatttgctaatgtttatgttgttttccttcaatcaaaatttacatagactttgtttaagtctaaactttttttctttgtgtcagtgccaatgtgtagatttcttttggctactggaatgtttcttggtacattccatcatggaacaggtgccaatccacagtggcagtttagtttttaaagcactgtttaagtcctaagtgacaagaaattcccaaatgcatatcctcctccattaaagtgatttagataattttaagtcttaataaggactgtatttccatttagatttatgactttatagcatctcttctgtgtgtgatcccttttgtaataggaaataaactttgtggcccacgctgtcttttcttattccttcacagctacttaaattagtggtgggggaaataatatttctcagtcatgtgttattttgaaaaagtgtatattttgtattttccctcaaaagcaatgttgtctctaagttcttaacactgaacaaatagactaatatttctattgtgctgctctttctagtgccccttcttggcagtgtattatggacaagagagggaaaatgtaaacactggattaatggatgtttacaataacctgatggtgtgtagagtgcagcatctcaagatcctgtttgctccttggtcttgtggtctttaagactgtgtcaaaggcctgctgtgtctgtttgttaataaggagttgttttacatcagtaataaaatggagattatagtgaacttctataaaactacctttgctagtcagtgttagagtccctttagcacatcatctttattgtgaatgtggattttagggttatatttgtcccacaaaatatgtgaaaatctgcaaattatggtgtattacattccatgtgatatggcaccgtgtgttacctccccaccttaggaataaaaatgattattacttattttgttgctgcttcagcgtaatcctccaagagtacccttctttgaaaaattacatgaactttatatagtcttgaatcattttgaagtgaaataatagtgtgtattccattatctctttaattcccaaatatttttcctaaaggcttcctaccaagtatttgaaaaaatttttatctactgtagtcagtaaatatagcttggattggtcaatctatgtgatagacaagaaactactttgttaggatctaggcctccattggtaactacgtatttctcttattgcttctattcagagtgtgttggcagtgctggtgctgctgatttttctcttcttggatcaaaggagatgtaatggagaagtggctcagaacatgtgccccatctagggtctagagtcatttgattagtctgaagattgaggaagacttttctataagaataaagacattttaaaagcttagattattaccaggtttctagttttgcattaacttgagtcttaagacatcagaagtttttctttcttactgagacagtacacagagactatgtgtacattgagaaaacatgacaattaaaataataccattagatcttcatcatagaagttaataagataaactaaaataaaatatattatttaaacagacaacccttacctttcctgtatgattcaataaatagtgtttgtggaaaaatgaatgtgcaaaatgagagagtggaattccataagcttaatgtgctcttaaccaatagcaattgctgaagtgacttcagaggtgtaaagccaagacactaagagtgtgtgcacttcgatgttggtcatattgaatttagaaatgggtgtggaaggcttagataaagacgctagaaaaaaatcaactgtggattgttccattgcaggtggctgcttctttatttgtgttatggttgcttaaaaagtgagtatgccacactttatgtggattgtgttttgtttatatttagaggttataaactattttaatatatactatgttcattacacccttccatattcctgctgattatgaggggagaaaccatgtttcaataattcttcaatttctgaggagactgggtcccagaacaaagataccaaattctgcactcgtgctccatgtgtaaaactgttttttacacatacaatacaatagtattttgcatatagcctaggcatatcaccacatatactttaaaacatttctagatttatatgatgcccagtataatgtaattttcatgtaagtagttatatcctttagagaaatgatgataagaaaaataagtatgtgcgtgttcactaaagatgcaattttaagaataattttctcagtaaactgatggctgaatccatagatacacaggagatacataaggtttgctatatttgttcaagttgaaagctgttcagtgcctttatctcttcatttctaaaatatatgttgttttcagttttcatgaaatgcaataaaatatatgaagcaacagttcatatttaatagtttctactaattattttgttcaaataagaatcaattacatctatttcaattatgagaaaccttaacaccttttggcaatacaaaatttataaaactaagggtatagtctcttttaaagtcagcatttcatgtttccttatacttatttttattagtgattcacttggcaagtttggttgtcaaataatccttttcttttgttttacagcaaccctgttaacagtggaaacaatggtactaaaatttccaatagctcctatgttgtgatcatcaccagtaccagtttctattatattttttacatttacgtgggagtggctgacactttgcttgccctgagcctcttcagaggtttgccgctggtgcatacgttaatcacagcatcaaaaattttgcacaggaaaatgttacactccattcttcacgcccctatgtcgaccatcagcaagctgaaagcaggtacttgtgactaggtataaagtggagctgcccgcttgccatctgtgtggctcatcggcctgcctgccttcagtagcagcatgagcgggaacacaggcatctgcccctcatccaactaccttgtttggcatttctaagatactgcaggcaagcatacccatgctccccagcatttctgtatcagcctagtagagtaaattatcttgttacaatgtgatttgcgttcagtggactcacttgaagcaacctcttttggataacttgaccttctcacatacttatcttgatgggaaaaaaaataactgtttcttgtgcctcttcaagagtggtcatatgaatgcattagatgactttggggggagggggatagtttttaattattatgagacaattatagtacatgatccttgtataatgcatttgacaccgatttaattacagtcacagaaagtaagataatttgaaaaatagaaccaaacatttcaaaacctatggtaagaagggtctttgaaaatgtggtgcattgattcgcctctgagttagcttactttaaagaccatgaagataataagcctcctaagttctccttcactggagagcctgctgtgtgacactaagccagggaagtcctggcgcatacaaataattaaagtatcattcatgtcaggcatagaaattcaactaaatgtagagaaagctacagtattgagacctttttactgtaatctgtctaaaaatctcaaatgtgcatcagatttttttaggtgacaaaattaagtgttgatgtatgaaaaagattatatttatcctggagcccttatgcctcggcaaagggttgcctcatttgcatatgatcctggtcatcctcttttagtctaagaatcttaaaactaaggaaatgggcaattcactctttaagagaggcgttctctcacatttctggcagaattgaacatggacacgtggaaaggacacagacatttgaggcttaggcttagtttggccacacaccattggtagtaatggctgtcagcagcctacgtgaaatgaatattagcatatttctgccattcttttctgtgaggttgttgctctcaaaggaagtgaaccatcctctttctcccaaaatccactcacagcgccctctccgccctctctgttttccctctcagtgatcaccatacattcttcttttctcatttgtcttcccaaaatgtcatctgtgtctcaggttagttcctaaccactttatgctgtgttcctccttattcaacctcctggacctaagcagcaagatgacctcaagagatttccaatcagcctgcactcattatttggtagctgtggtacatatagtttgcttttaattaaaaaaagttattagattcatggtttatgattctcatctgatactgaattattctgctatactttgcaacaacttggaatttcccttggatgagctcttcagaattgtgcattgaccatgcttttccttgacagtaattttctcaggctttttttttcctgttactttctcccactttgtcatactcaaattgcgatcatacagacacataataaaggtcctcagcaaaatgcggttataatacacagatgctcctggttgaaataaaatttgaaatataaatatcactatgagtatactattttgcccaagcatactttcagttttaaatagttattacaaatgtcatggaatatacattatttctctgacttatttatggaaggatatccataatgggtatccatataatatattcataaaatatcctaaattaatatgttttctaatgtatcacatgtctgcataagactttttacttttgtctgtgggtcatataaaatagacatggaattatctatcctattgacttcaaaaatctcctatctgggaaaagagataagttatatgtacacacacaagcagctgtgatatacagcacgtatgtagtctctgcaactcaggcatacagacaaggacaggaagagatttttttccagatgcagtaaataccctactctcttgcagacaggctatttgaattgaaccaggaaagaggtacagatttgacaagaggagacagggcttttagatagaaaggaacaacacataggcaaagtaggaaaaggtagactaaagaagacatacttaccagaagcagtgggtttgaatagcaggatctaggttagttaaggacaaattatgggaaactattaaatattaaagaattttggactttaatccagtaggtaatagtgaacgagtgataaggttcactattacattgttgccatagtgttgtgttacactttatctgttggcttagctccttttttagaagatgaattcctgcactacaaggagaatgacttaatcacctccctgtagccagcattaccaaagcatgtagtagacatggaatttttagttcattgacacaacaatcaagactcaaatggggtgaatctggaatttagaatacaggttgaagcttatattcccagtgaagaagatagacaaaataaaaaaggaagtctggtgtgtactgagagagacagctgtgggttttggatcagcatatctaaatggcagaaaactccacagggagggtgtatgtgccctgtttggtggagttgaacataaaaaattgatgaaagcaccgccattaagacaccttgaaaccgagagcagcagaagtgaggcccaaggggtacgatgaccagacattcctacccttaattatagtaagaacttgattaaagacactgcttggagctgagtcgtaggggactatgtgttttataaaagttcaaaagtaggaggcaataacttaaataaatacatagaattctcaacaaagctaatatttgtaagttcttgaatttctgactagatgataattcttattttaaatgattttgctgtgctgtgaatttaggataaaatatattggtgtccttctaaaagtgattaatatttgagaatatttatttgtatcacaggtgggattcttaacagattctccaaagatatagcaattttggatgactttctgcctcttaccatttttgacttcattcaggtttgtaaagaataactattatcaagtttttctatttgccataaagttttgtgaataatttcaaaaggaagcaagtgaatttgttgctaattttccacatactagttgaagtcctggctagtgaataagttttatgaagaacagcaatgtttaatagtcataaatttagtgaattcagtaactagctatgtctatctatttcaggcatgccctggatatgatactatcctcttgaattggtttgaaaggtacaaaagacagttttccgcccaatcattgaccataaaatttgactcatagaacatttcttaagtccaacactgaaatgaaaatgaagttcctggagaggctacactctaatccagccatacccatgaacacttaaacacaaatttagctaagcagtttccccacaaaagtataacttaatggaaggatgaaaaatggattgttgaaaaaatgtgaaggaaaagaaatatttagagcctctgaggctctcccttagtgactgctgtgacagacctccagggtagccatgctatggagatgactgaaagtcacttaataacaaaagaaggccattgagtggagaccaaagtgaccatgaaagcatcacattaggactccaatgtcaaaggacttacaggagttgtaagctgatactcttgcctgttgaatcaggcagttttctgagctccctgttggcttcctgaagcttcagagagcaaatgcacttggagaagtagttgtaacacaacatggtccttgttggaatgacacagtctcatagcttgtcccttcccttctctttaaaatagtactgcatctctgaaaacttggaaaaaatgtggaactattgcccctgtatgtatacacacaagccacatcagcagatgcagagaaagcagctgttggttcacctcctctgaaatgattgacataattaaatacacttactgtactaagtgaactgtgttttggatttccttcattgctgtgtttaaagatataactttacggtagcagcacctactggaatttttttaacccaagttttgatttatgtactcaaaagtgttagtttatgtgtgtttctttagcatgagacatttgtttcccagtctcagaaaataaaccaaaggtccgtaataaaagtatactaaatactatatactaatataatataatgcaatataatatagtatggtcaaaaactggaatgtggatatctatctgaatctgcctacaaaagtcttaaaaatggtgcttgagtgatatatatatttatggtctcctaagtatctcttgttatttagtttatctcagaaatctgggagagctaattttcaaatatttatcttacaaattaaaggttatttgacatttgtgatggctttcaagtccttttatgtatcttaaacacttttatttcaggttctagagctgctaaagcttcatgaggtagcaaatctctcagagctttcttttgagctgagatctaccctgcccatttcccttcaggacaccagccagaaagcccatggaaactagtggagaattagcgtatgaaagttacactaagttggttttaaagttagcacatgtttgatgtcatgtggaccatttatttggtaaactgtagtgaggttgcaaacagtattctaattttctggggtgtaatacagtaagatgtctgcattgcatggcagaattcattttgatagtgtggctagaaaaatacttaatttcaaattaaatccatctactataaaccttttgagttactggagtatctccagttattacagtaggcataggtgaggtgagatataaataacacttattaaataatactcctttcaatattacatatgaaaaattagagtcagaaaagtgaacttgtcaacatgactaaacctaggtttaaaacagatatttgtaatttaaaatgttctgttaagaatgtttcattttaaacgactccaacaaaatcacaaaagataatatttatactaaaattattttgaaattttaatttttcaatggacaggatgaagaaaatcataatcatttcacatttacttcttataaaatttagagtgtgtgataaataaaaatatcccaagaacagaaagcaccgtgtaaagcttcagcagctgaactatcacatcagcaaactaaacaatttgaacattgtttctctgcagccggcagactgccttcgagctggcaccttattcatggatgcatgtttcctcactgagaatagtgcagtctaagaacgtgtgtagacacagctcagcaatgcccctgtccacttaacaaagtgaaaatgtctctcactaccatgttctctttgaccccgcagttggtgttcattgtgattggagctataatagtcgtctcggcattacaaccctacatcttcctagcaacggtgccagggctagtagtctttattttactgagggcctacttccttcatacagcacagcagctcaaacaactggaatctgaaggtacagcatggaatgcattgcaggggttcctggaagtgggtgagggggaccacatttactaaccactatactgctttaaatctctaattatataacagtggtgtgtgtgtgtctgtgtgtgtgtctgtgtgtgtgtctgtgtctgtgtctgagtagtagtagtagtagtatgtgtgtgggcatacttgctcgtgcaggcatgtgtgggaaccaaaggctacctttgtcaattgcttctcttcttttttcccttatcatcttctttctacttcctccttctctgttccctccctccctcccttccctctccctctctcccccctccccccaccatccctcttttcttccttcctccctttcttccttcccttctctctctctcatgagtttctcacagaacctggcatttgctggttcagctggactggctggccagggaggccccgggacccatgtgtcttcatctctagcattacagacattcagtacaggcccaaagtttttcatgtgtgcttggaatctgacctcaggttcttatgtttgtgtagcagacatattaccgactgaactctcccggcccaacaatgaaacttataaagtacgtgaggattgactttgttaactactatggctttgttttggctttcaaacaagtgtatacccttaccattgtgtatgcatagacatgcatacgttcttatactgctcaaagtcaaaaccagcaatgctatttttcctcagagtttctcccagatttcaagtgagactggatggaattcttccatttggcttatcgtcttcaggcctttccttattggcctggcttggttaatctttgctccatctccttaggaagcatctctttcagaaggaaccttggtgtgaggcaattatttttttaatattttttattaggtattttcctcatttacacttccaatgctatcccaaaaccccccatacccccccactcccctacccacccactcccacttcttggccctggcgttcccctgtactggggcatataaagtttgcaagtccaatgggcctctctttgcagtgatggcagactaggccatcttttgatacatatgcatctagagtcaagagctccggggtactggttagttcataatgttgtttcacctatagggttgcagatccctttagctccttgggtactttctctagctcctccattgggggccctgtggtccatccaatagctgactgtgagcatccacttctgtgtttgttaggccccggcatagtctcactagagacagctatatcagggtcctatcagcacaatcttgctagtgtgtgcaatggtgtcagcatttggaagctgattatgggatggatacctggatatggcagtctctagatggtcgatcctttcatcacagctccaaactttgtctctgtaactccttccatgggtgttttgttctcaattctaagaaggggcaaagtgtccacactttggtcttcgttcttcttgagtttcatgcgtttagcaaattgtatcttatatcttggatatcctaagtttctaagccaatatccacttatcagtgagtacatattgtgtgagttcctttttatttttaagagagtaaacttaatgtgtgtttctgctttgaaacttaggagctaaatcaattcacagaaattctacactgagagacttagagattgagtctcaaaagacaaaacccattttctcagcagttactaatttaggattagccaagaatattgactactcttagacaaggaaatgtgagttaacaaggaaagtggttctgtccactacctacctatctaccatggtcagcaggtaaaagggcagggccatgcactttaaaagtaaattccggtttcagtgagaagcccacaccatagatgcttatcgtgaagttactctggagttcatctttgtcagaaacatggtagtatgaaattctgttctgtattgcaagctgtacattatctcctatgggatgatttacaggcaggagtccaattttcacccaccttgtgacaagcttaaaaggactctggacacttcgagccttccgacgccagacttactttgaaactctgttccacaaagctctgaatttgcacactgccaactggtttatgtatctggcaaccttgcgctggttccaaatgagaatagacatgatatttgtcctcttcttcattgttgttaccttcatctccattttaacaacaggtaatctgaacttatttttttgtcagtgattaaaatgccatatgtttatattaaaatatttagatgattttaagtagacttgtagagcttacaagtaatttctttgcatttctgttgttttgtttctaaataatttatttaaaggtttatatggtattgttactagtttcactatttaagaataatgagacactgagtcagatagcaaatatgtgactaacaagaaaaatgtctttttcatgccaatgttggaaatctatatggggaaagaaaaacatatttgtatacacatgcacacatgtacacacacttatcatttcacacttcctgtaaaatttcttcacttaacaactacttattggtaaaattcttgtctaatatgaatttgaataaataaaaattagcatagaagtaaaataactgacataaaagtgcattatttttcaaatataaatgttctgaaatttaggatcttcaaggaaaaaataagtcacaataagaaaaattaaaatctatacagataaatgagtattttaaggtgctggatttctgagtcaaaatgctatgttacttatatatacaccattttattatatataaaatattgtatattatttatagcaaaatttcagagcgaatgacacatcaatgccagatttgcaacattatttgattataagaacagaattgctcaactccaatgaagcagcctttgacaagttatcaaattgtgtcatgcagcctcagggtgggtatcacacttgattacctgaaggaaccagcacaggcactggagagtcaggcataagtatgactcatgtagatactggtttctgttctcttcattctgtggatgatgcatttctttctcactctgtctctctgtatctctctgtctttctctgtctctctatgtcatatctatatctatatacacacatatataatattatataatatatttgtatataataaatgtatattatgtatatatttcatgtataatacatatataatatatacacatataacatatatatatatatatatatatatatatatatatatatatatatatatatgagagagagagatctgtgtatgtgtctccctctctcttcctccctgccctctctcagaataatagttatcttcatttaacaggaccataacacatgagcttcatgtgccatcttcattcttcttcttgaattaatggtatggatcctgtgtccaattattaaatcctagagaaggcaaaaaacatattccttctggctttgggcccactgcagattgacaactgctatgaggatggttaacttacccatatattgctttcttcatgcatggctatgaaatgaatctatatgtaggtatatttgtggatacacatatagtcattttgacaccttaaaataatttttggaaggtataatattgattatttgtatataaggtaattcagaggggatcaaagatgactaaattacatggattaagacttcacaattaactcaagccaatgtatcacatgctgtatcagactgtatattatgactaagtcctgggttactaaggccagtactcaaaatcttcactagtcaacacagtagaacctccaactgtgatgagcagcacagcccaggaacccagccataaccaaccaactctattggtcttaattttattgatgatattaacttacattaatttacagccattaattaacttccctaattccctaatcgtgtgggcagatgcacactaataacactttcataatattgtgtgatattttgtgtaatacagtgtagtcttgtttgtaataaatggccagtgattattaaataatactacttggtattaaaatattaccttacttttttttaaccctcagaataagaaatgtataagggacctatataaaatgaactattaacaattttcaatatattatttgatattaacacagcataacatgtgttatctatggtgtacctaagaaggagaaaatgtcaacatgaaatttttcagctattaataggatgacttgttcatcttgatgtttaactttatagtaatttaatggtagattaagcattatcatttgggatatgatatcctaactttaaaataatttatgaacacttatcttaaaaatatttgtagtcataatcctcattttttaaaattttaattagttgccctttctaatcctaaatgaaatttactctaaaataacatattaacactgttcttttcaagcagattgggcatttttcttcttgcttttaatgtaatgtgcaaacttctcccttaaatggctggcattagttttctgactgcctggtgacaagtgaagactcctttcttagaaacagcttttgatgagcagagaccatgacccttacagaggtgctcagcacatgtgctagtgctactcggatggatgtggccctcctttgagttctgtacaggatctcatttcctatttatttttatctatctatctacctatctatctatctatctatctatctatctatctatctatctatctattcactcatttatggtgtggtattcaatcagtatttgtttatattgttacatacagagtaagagtagacaattactcactaccaacattaccttcaagacctaagcatcatttaaaagtgcagcagttcccaatattcagtcactatttgattttaaattctggatgaaagcttactcaatgaaggcattattgttcaaaggagtcactaaaactgcattaaattgaaacataaatttattggcaagcgatgagagagagatgaatacaataattcacagaagagagaaataacatatactttgttcaaaacccttttccatgtctaggtgaaggagaaggaacagctggtattattctaactttagctatgaatatcatgagtactttgcagtgggctgtgaactcaagcattgatacagatagcttggtaagttactatttttaattttatgaaaagttgagagaacaaaacaaaaagagtaggcactaacatatgaaatatatatatatatattactcagtttaagaaataaaatattcaggttactttaaggacattctgtattccacattaagctgtggcatgatttatctttcgtcctcatggattatcattattatgtgtctttgccctggagttttccaaagcaaatcttagaagtggaagacattgctgaggttagaatctccccaaacttggcttcactaacgccaaattactccagtctgttgtgccactatatacttccagcaagagagcatgtgaatgtttccagcagtatttcttattcaggcttttacaattttgccagcttgatgaatgtgaagtaactactaaaatttctggataacttagtaagtctctattgttgaccacttggatttttattgttgtttatttctgttaaatgcttgtttctgttatttgcaacctgatgaggtttgatgtgcttgtttgtttttccttatgttataggtgttcttaagtcctggatcagtcatcagttctatacatttcaatggcccttgagccagtggctttactcacagtataccttaatgaatggaaacattgaatttgatagagagtagtttattttcctttacctttatggcttgtgcatttggtgtcttgtttatgaaatccttctgtatattaggtttccacattcaacagcctgacatttttcataatcctcttgtcttattttgaaaatgtctggtcatagtgtttgtcattgctctgttcctttgtgcttaacggatgctgtcttgcatttgaggactttgtgtgttcaaagaccatatttggtgtattcttccatagagtgagagcctgaagtgatatttgtgtgctaaaatgatacaaaggactactaattcacaagggccagggcaagaaatgaaaagaggttccataaacttccctatttatattttaataaaagccatattatcagttagactttagaattggcctgagaatgtcataactgatttctttttacatatttgattacagttatttgtgtcagtaaggaatgtccataccacagcatgagtgtggagggttcaaagggaaactggtggggctcacctccctcttttcaccatgtgggtcctaggggctgaactcaagtcatcgggcttagcagcagttgccatcacatgctgatctgtcattgcggacctgtcactgaagcttaaggctttggacatacattcatccattccttatgtcatttctaagaggtctagaatccatacaactccctttacttccattttcagacacccattcatgtgattgcaaaatttctatagttataatatataaatacatacagtatatttttttcataaatatgtcacaagggaaaaacctaaaatcttttaaagcctcttcttgtttgttcattttcatcattccatgaggcagcttagtaattccttgaaatacagttttcttaggttttatttagttagaccagtccctagtctcttctccacacttcttggttttgtgttggaattagctgaagaagattatataaatgctgtttctatttacttaaatttttaaaactatgacttcataattcaaaacccttgtgcacattatatatttctttacataaaaattctcttcttgtacatgtacaattccctttgcaaccttaattttctggcttaatcacatagccaaacttttgacattgcaacacaatgttgtcacctacagagttcacactcaagatatgtacagttaagctcctaaacttagtcacacacattcaacctaagattttcagtaagtagtaagtttttgatttgtgttgggcttctttcatagctctgtttgtgcagctggatgtggcctgtgaactgtggattggacagtcctgttagaatagcctttgcacaggctgacaaaaccgttgctaaatacatttctacttcatgtatctagtgtccatgaaagacacttaaagtatttctccaggttttcccatggctatgctagactttgttgtctgacattgtatctttcatggtgtgtgaaaggaccctttacagacctattgtgtttgtgacatggtctatgaaatgtatcaatatttgcagttgattacgttttcaaaagtaatgctcttttgtttaatatcaaagagcgtatgttagtttgcatctctttgccaagcaatgctggcgggccttcctgggtgttggtggtcccttcctgctattacctcccatcgtgctggtctcacctgcactgctgcgaaaactacccggtagtgctcttctttccacctcttgcttgggaatctgaagggagaatgtctgatcagtggccagtagtgctcttctttccacctcttccttgggaatctgaagggagaatgtctggtcagtgctttcagatttcacacccacctgatgtaaccccaaggttttacaacactaagcaaaaactcagtgtgatgtaattttatcttactgtgctttaaactgcatcaagagtgatctgagtttaaaatggaacaaatacaatgttttctttactatattataaagctaagtacaaggctattcaggaaaaacttcagagttggaataattacttcatttcccatctgtcccaatttaaaaattaatacagtcaatttgactatgaagttatgaatatagcagtataactttgtttttattttctacctgttacatacccacatatctctagctttctttatctctcagctattaaatccaatatcacaacaacacaagttatgttgtgtttattatcacatatctggaatgctgatactcagaactatccagcaaccttttcattatgttttcataataaaatttactcccaagctctttcctttatttctacatccttttagacattataataattctattctttaaactcttagccaaagacctttctatatatctcacagaaatacatacatataaccagaaataattcccttacatctctctactatctctttctcttttgtctttttaaaatttttttaattaattttttacactccatattccattccccacccccccatccactctcccactgctccacatcacacacttcctccccactcccccatcccccactcctccacccccacctgatctctaaactccctggggcctccagtctcttaagggttaggtgcatcatctctgaatgaacacagatctggaagtcctctgctgtatgtgtgttgggtgcctcatatcagctggtgtatgctgcctgtttggtggtccagtgtttgagagatctcaaggttaattgagactgctgctcctcctacaggatcacccttctcagcttctttcagccttccctaattcaacaacaggggtcagctgcttccattggttgaatgcaaatatctgcatctctttcagctgcttgttgggtctttcagagggcagtcatgatagatccctttttgtgagcactccatggcctcagtaatagtgtcaggaatgccttttgagctggatcccactttgggcctgttgctggaccttcttttcctcaggtttcctctccattccaatccctgcaattctttcagacaggaacaattatgggtcagagatgtgactgtgggatgacaaccccatccctcacttgatgtcctgtcttactgctggagctgagggccagcaggaagagtggaaacagggcaacctcaggaaataggaggttggggggggggggacgacgaccctccagaatgcaccagaggcctgggaggtaagagactctcaggaatcaaagggagggaccttagatgaaatgcccaacagtagggagagggaacttatagagctctttcttaatgtagcatactactagaaaatcttgcagtagacatgacatcttagagtatgagtacaggtttattgaatctctagtcatatgtactctctttacccatgtccttgcttctatctagaggcaagtcctgtgtagttgcctgccctttatgagacttttcaccagtgaatactttcatttggtctccagtttctgccctaattatttgacctgtttacagcaaaacttctaaagagattgcctttctctgttatatcttctgttctttacacagtttcttccatattcatcacccatgtgagtcacaataaacatcatgtacaaagcaatgtccttgtcttctgaagttgttgagcactatttcacatggatgaatccttatactatttcatttttctgctacctcctgggccttcatctcatgtatcctttaaatcatcatttgtattacttcttctttccacatgcattctctatagctattggtatctaaccccatggttcaaaagttgtctcttgatgaattatagattcatatatttagtgtacatctctctattcctctctatacatgtccagctaccatcttgatacctccatgaatctataaaatattctgctagattgttttctagtagatttgacatgcaagcatatgagttcctgtacatcacctcagagtgcacatatgatcttaagtggccatcgaaatgatacaaagtttatactccctgaaaggccaaataaataaatgagagccaacaaaggtataaaaggtgatattttaaacttggcagtattaaaccatctggtgtctaagaggttgctcacacataatttcttcatttgataactcatatccttccagaactttctaccacagaaggaacagaaagtgagcagtcttaatatgtgaatgccattgccttcgtttttcaagaagaccagcaaataagcatccctgtttccactagattattgaactgaactgtatgtccctagtaaaaagaaggaagttgcaaagttaagaacaatgagcttataagacttccatttagatcactattagtgaagttccagaaagttcttgcatggttggtgcaatctgagaagagttttctgtcagcacaaagtcactctgtgtctcctttgtgctctcatcacctgtgtttattttgggttccactgaggatcaggtgactaattgtagaatgagcaacatgaaatgtgggaggacaaaaaagaatttctccttccttcatgactgccgtcaccaaatgtccttgtattgaaagcagttcctgttgtaccaatctgacggatgagttaattcatcctctttgtcttttgcctccttttaatggtagcttgattgtggtttgttgttgttcttacaagtctttgtggtgtatttttcaagacattatgcattcaaccgcaaagagccttgcatttctttctggctcagacactaaaaagttgagtgcctttagacaagtcatttttcctcatttccaaggccttattttcctcctctgtaaaattaaatggtttggttaggaatttttcagattgctggcatgtttgacattctctctctgctgaacccttccatataaaaatataaactcttaacctacatgtagatattatttcagttcttaggaaatccacacaccaaccctatcctgaatgctgacattcattgaatactagcctgtagttactacagctgactcagtatgttactacagccaacaaagaaaaagtaactaatagaatgatatttttgaaccttgaattaagacaagaaatttaacagccccctcaggaattgctggagtgtacaaaattgtgtgataaacttggaaaattgactagggctttggtcctgccactttatcttcctggtttaggttttgtcctatgtacaatgaaaggatggattagatcatgggctctctcagtctggctacagatgaataaagctgctttttcaggttcacagaggccagggaaattagttcttctgctggggcaagtatcagggcctgttttctgtattttgaaatgtgcccaggtgattctaatgtgtatggaggcctttaaatcactggattaagtggtcctgcagattcctttttgctttgaatgtctgtgagtcacgttacaaggattagcaaattttttctattaaggttgaaatgaaaatagtttcagctttgtaagcttatgggctcatgacagcaactcaactcaacctttgtatgacaaagcagccatagacgttcatgagtggtgtgtgtgtttcatttcactttggcaattattattttcagtttatttgaattttgagtggtttgggtttgagagatagggagaaaatatgaaattgagaggatagagagatagtaagtagaatctggaagaaactgggggaagaggaaagaatatagtcaaaatacgtaaaaaaaatataaatgaacctaaaataacaaatcaaaatatcctatcaagaattcagtattttcctctaagcatctatattttgaaatattctaacttctccaaagcattctgtcagtcagcttcattttctgtatgtaacatgaatacttaggtaagcatcattgacagcacaaaacatggtttgctagtggtccttccatttactagtaactataccctgtaggctaagcatgagtagaaatatggccactatgtcatattcctccactccatctgcttatatattgtattcaccaactaatgctatgcaagaggcctggtttggtctgtggtacatacaccagtgacactccattgaaaggattgatttttctctttcccagcaaatatcaattgcaaatagtttattagttaagggtgagacatgtccaattcccctttcccttctcagccctgagagttttgtctgctttgaacatgtggcaaccttgtgaatgctatcactgtctctgtgagttcacttgtgtacaatcctgttgtatctggatgacactatttccttgaaatcatctaccaccacttgctatctccccttcctataaatctctcagttttgagaggagtggttctctcattctctgcacattgtccagtcatggattgttttgttcattagtttctgctgtaaggaaaggcttctctgatggtggctgagtgaggcactaatctatgggtacaacattaggtcattaagagacatgttcctgttatattctttaggctgaataatagaagtaggctttcccctacagcccatgacctacctaataaggtttttgcccactttagatgtgtcaagtatcctatctcatggaataggtcttaactccaattatctaattgttggttagtctataatacttgtgcctctattgcacttctattatagtttctggatttgtagctagatgatattaatgatttgtaattactttatgtgtgtggggggtttgcctgcatctgatcaccatatgtatatctgatgtccatggaggacaggagacagtgttagatcctctggaactggagttatagacagttgttagctactttatgaatgttgagaaccaaaaccaagtcccctagaagaatagcctgtgctcttaaccactgaactatctctcaatcctcccccataatgacatttttgtctgggattgatgaacattttgggcatgggaaacaatgtcactattgccatgactttggagtgcttggtcattcattgaagcataattttgttattctgccttctaaagaactaagtaaaattagcaaatatttttatgagacatttctggattcctgaaaatgctgtaatgacttctgtgattagctagaaaagatgaacaggaaaatttagagtcgttttcatgataaccgagttgcctcctttataaattaacattgaaaggaagctattgaactacattttgttcttgccatcatcattgtcatcttggtgcttagattagtacatttaggcattactgtaaggataataacagttttaaggattacctcttcctcaatatatttaggggaaggctttggctcttaatacaattaatgtaccagaaattacaagcacacgaatcgcaagcaaacatttcactttatcttggctacattccaatttgaaagaataagaacctatgctatgttaagttttcttgtccataaataaaaaacagattcagtgttttagcacctggctcacctggctctccttttgtcctttgcctttaaagtatgagaacatggtgttaattccttacctgacttcattgtaatttaactctagccacacagagatttttcctatccatggggctgactaaccttcctgggtagggctgcccatactccttccttcctaaatcttctaagcacagcagacagcagcttgagactggggagtatgtcagtctacagctataatgataattaccaatgctgagtgactgtctagcgctaagacaccaaggtttttacataccatgtggaaatatatagtagacaatcctttaagaaaggattaagtgagttttgcaagttttatgaaaacagataggggtaatctctgcaggggtaatctctgctgtagtatgtggaagaataacctgtcatatgtgctttcctgatggagagatgcttccaaggtgccgcccaccctttgagggtctccagggttgtgatgggcagctcctatgatgaacacactatgctcaaggctgacccggtggtgtttcttaacactctcacctgctttaaggatcaattaaagtggcagagaaagttcattgaggaaatttgagaactctgtgccatttgcagcaagaaaaacaatttgaagcaagaagtttaaggtccacagctcagagcaacccaactccaggtctctgagccccacccccacccccagcgctagcaggaagtggaatttgatgtgcagccagcctatgatgtccttatgaaatgagaaactacaagaactttgactccaatagctacaacaaaatctatacccaactcatccatgagtgcatcacgctaaagaagaaggatgaattcttgatctgcttcacagacatccatcaaaacttcctgaggtatcgtgcacccaggctatggactctcctctgtctggtcaagcactggtatcaactgtgtaaggagaagctgagggagccactgtccccacagtatcccctggagctgctcacagtctatgcctgggaatgcaggctccaagacagctctggactacatacagcccagtgcttctgaactgtcttagaactgatcactaactatccatgtctttgaatctactggacatggtgttatgattttaaacatgagatctctgactacttgcgcagagagatccaaaacgacaggcctctgatcctggatccagcagactcaacaaggaatgtggctgggtcagacttacaggcctggcaccttctggcaagaaaggctctgatctggatgcgttcgagactttctttatgaactgtgatgtgtcctttgtgaatggctgggaagtgccaccagagagaaaagaatgtgtcttccagtgagtactgcagtacttgcccaggaggctccagagtcagggcatgcactcactcctctgctgcaagaccttgatctagagaggacaggaaggtgctcaaggcttcagtgaggggcatccagcctgtgatcagactccaggcttctgattcctgcctgcccatggacagccttcctcacagcctgattcatctgccttgtcctccaacagtgttctctgggagtaagactctgaaggaaagagaagaactcaagcttgacttccatctatctacccattgggaggttctacctcccccaaaatttctgatcatcagcaataaaccacaggaagccatgagtgggtgtgtgtactctgagggatgtatcctcatcccacaaagaaactgttcagcattgcacgtagccctggagccctggagccctggagccctggagccctggagccctggagccctggagccctggagccctggagccctggagccctggagccctggagccctggagccctggagccctggaaatttgacaagtgttcatcaagctgcactatttcttcaacatgcaggctggggttacagcagtgcaggaaaataaaattgcaagcactttaaaatgtatgactttaaaacttaggtgggtgtgttaggatgagacctgaagcactgatttaaagcaaaatgcattgaaaaaaaagaataaatgggataataagttcagagttacttggggaaccagccctgcctatggcctaggcatttattaataatattaagcctctccgtttttattcaggtactggcacatgggtgaaaaagcccatggctatataaaactagtgttctatgttataacctctgactaatccagttagcaatatacagttttagactaagaaaatgagatataaattcccagtcttgaagacataccttatcatcctcacagcattgccattatcactgcatagtagagaaaacaatggctttattagttagtgaaaaaggtttacatgtctttgtatggttaagcactagatgttctgaagattccgttcttcgagtacaagaaatactgtggacatttacaatagtgagtaggatcatcaccaggggacataatcttcaggtcttgacttggatcgacctttccacaggcccttgagtcagtctggtttctgtcactgcaacaaaatacctggtgtaaaccccatgaagaaatgaaatgtttctttgggcttacacagtccccgaagtgtcagtccatggttacctgccttgacttcagtcctttgctgaggcagaacatcatggcaacaggaatatgtgttagagaaggcagcttacctcatggcagccaggaagtggggttagggatttaggattggggacaaactctcaggggccaactttcagtagttatccatacctcccaatgtttctactatactctaaaagccccatcatcttggaaccaagcctttatcttggagtgacatttacaatccaacttataactactaggttttagggacaagggtaggttcaagagagatatatgttggatcatcattcaggcactgagggggtcattagcatgactagcatggcaggggctgtctctatccttctccatttaggaatctgctacctgcaagtcctgtttccgggaaggatgggctccttattttctgacttgatattacctctatagttaatttggtatgtacaatttgaattctatttttgtaagaaggacctaccaaattgcttgagctttccacaaagctgagatccgtttttatagaggatatgaaattttgacagggaaatcaagcgtacaatgaataggacttcaactttcctgtagttagttttttattattgttgcttttgctgtacggagggaagaactctggctaattgagaccctcttagttttgtagtggagctgagctctttcgcaggctcctttgtgagttctctttccatgactcaccgaagttcctgtcttgtctacaagaatcatctgggagacttggtcttgttctgtcttctctttttgcagaaccttcttggtttcttccatgcttcttaggatacaggacaggacaccttcttgcaccttgcccatattcatgcttcatatcgtgagtcgaggagggtgactgttctcggacatcctaagttaatcaatgacaaaatttttttctaaaactcctaagtcttcagtgttccagacagtggattttcatttttataagcaacagtcttgctttcttgcccaagctgacatctgagcctgaactcaaatgaccacttcttagaagacatgaatacctacagttgtatgtctctttgggacttggcctttgaagcataaaagtcattgttcatatgactacaaaatgctgaactgttactatgtcttgacttttaaaagactgtttgtgagacttgaaagaatgctgtggttcgggggtgactcctccttctagaggcaatcaacatgctgacagccccctggttcaagaaattggttagtgactagtctattccataatggcatttcagtagttgctactttatctgactgtcagaaaacgtcctcagatattgaattgaactacactttgctcatattgttataacgagtgttggttagggatattttcaccagggtgagaatagttagacttgaggttcattttaagcattgatattgtaagaaacaacttataaacttttatttttaacactcaataagtatgtgctgtctagcacatagaatgttaaatgttctggatttgtctttaatggtgactatcactgatcaagttaggctacagtgcttcagtcaaagaaatgtgtattacttttcaaatgaccaaaatcccccatctctctctctctctctctacatatacatatatatgtatatatatatatatatatatatatactccatcatatattcatttactaattgttcaaatagataatatctgttgtcatcatattttaaaattatcacaacaaagttaatcagattattaaaatcagagtattaaaataaaattaaagcagcattcttttgttgttgaaaatttgccaagttcctgtatttctgtgtgcactaaatatgtactttattaaatgtcatattggaatatttataaaccagattgttgcattaactttttccaaggaaaggtgaacaaatgtattttcactcccaaccagacactgaagaagggcaaaagtaagaatttcatccaagtctaacttggtgaacaatgagtttattgagagtacaataagcatggatgacggatcacttacagactgtgagcgaacataaaacactttcacactacaatgttcaactctagcatggatgatgaccttgtggaagctgctccaacgtgccctacttcctctcttagggtctcccaagatcacttcagctgaaagggaagagaaacagaaggggactgatggttggagtcccagaggagggtcccgaactctactctcctcccttctagtatggagcatcactatagacctagctgtcagtgaatattatcctgtctattttgccacatggctaccaggcccaagcatatctccactctaagatgaggaaagaacaagccactcttccacaattccatggaattgagaatataacctttatataaagtcaccttttgctaatgatgcaaattgatttcaaagtaatatttattagaagtgtaaactttttcactttctatctgtgcaataacttaaacattgtggattcactaaaaattgatatatgccttcagttccagtactcagaaggtagagacagacagatctctatacattcaagggcagcctggtctacagaatgagttccagaaaagctagagctacacacacacaaaagaaaaaccctgttttgaaaaaacacccccccccccaacgaaaaagaaggagaaaaaaagaaattgactaagcatcaggtgtctacaaataacttagttgacatacaggattatagatgttaaagaaagtggagaggcagtactgtctgcagtgctacaatcttacaacataatatgtagtactgtcatagtggggaaaagagttctctttgacatcatctatgcccttgagaatactttggttatttgtgtgtggactgcgtaactgagatttaagcaatcacaaaaataaacaggtctctacagaacccaattatatgtgtcttagttgtttcgctggctaaacatttaattatatctaattatttcctgttacttcactgaaaaccctgtcaaataacctagtgacagttttcttgcatcataatttaaaggttatctttttaggcaacgtcaaactaattatggccactgtctagagttttcaaacaaacaaacatactgttattttcatttcagatgcgatctgtgagcagagtgtttaagtttattgatatacaaacagaagaaagtatgtacacacagataattaaagaactacctagagaaggatcatctgacgttttagtcattaagaatgagcatgtgaagaaaagtgatatctggccctctggaggcgaaatggttgtcaaagaccttactgtgaaatacatggatgatggaaatgccgtattagagaacatttctttttcaataagtcctggacagagggtgagatttcagcattacttgctttgttagtgggtcccaactaccagagcaatatgttcgtaaaaaccatttgtaacataattatataatcagtatcccttatacatagttgaaggtgtgactgtgcaaagtttttatgtttcatatgaaatttgaattacagactctacacaacaggttattgtaaatgtgattgtatttgaatgtgactatacttgcaaatatgtaagattttccaactgcagatgcctttaaatacacacagacaccaaaaatacaaccatcactatgaacagtagcaccaaattggttgattggcacagtataaattaatccatcccttaattaacttagatgaaactttaaacttgagtgattttcttgcaggcaatgggtagttatatcttagttctttgggccactctgtcagtccatgtttctcaagtggtgcatttagaccatgagcatctagagtggtaggcacacattcaggcattataacttgttctgctttttgttccttgcttttgctctttatccctatttttaccttgaatccttttctttctgttgctgttccttagtatttatgattccaagactttctcatttcctaacatagcgattctacttttgtggtttttatgagtttctctagaggtcacaatatatattcacaatgaatccaggtccattttaaaagaataatgttatcacataagaggcatcagcaccctgtagtcccaattgctctctcatgtgtgtcatattcttcctatgggtcattttgtgtattcacagataatatgtgcaaatagatgttattaaaatgactttaagtaagcttccctgttagatccagtaagagtaagaaaagcattttagtttctaaaatgcttcctttattcatttagcttcaagtttgcaactccttgtagatctgagttgtgtcttttctctgagtaagttctcttaacatatctttcaagataagcccattgacagcacatagcttctgtgttggtttgataatttcttactttgccataagttttaaaagataactgcacaaggttcacgatcctagtttggcagagttttgcttttcctcttcttttctactcgtttcctgactttgtggtgtccataaagttataagtcattcttatctcaaattgttttgttttgtttttttgagacagggtttctctgtgtagccctggctatcctggaactcactctgtagatcgggctggcctcaaactcagaaatccgcctgcctgtgcctcccaaatgctgggattaaaggtgtgtgccactttaggggaaattttcctgaacataatgccataacttatgctctgagatcaggaatcaacaaattggaccttataaaattgcaaagattctgtaaagcaagggacactgtcaataggacaaaatggcaaccaacatatttggaaaagatctttatcaatcctacatgatagaaggctaatagtcaatatatataaagaactcaggaaattagactttagataatcaaatagctgatttaaaatggtgtaaagagcttaaaaaaaaaagaaagaaagaaaggtgtgtgccacgactgcctggccctcaatatttaataaataatatattttttactgggctttcttcaagaggatttctttaaaaaattttttgtacttttaagatgatatgctgtggtatgggtttttagctttaagcaacattctggttatttttctctgtgtatggattgagtatatgacactaatttttgagggaaccctcttagtaactattatttgaaatatccccctctatctttctcagcatccttttcttctctttttctttcttcttcatttctgtcttctttctctttctggtatctacattatatacaagttacacctttcctaattgtgccatgattcttggatatgctgggggagggggttgtttgttgtgcagaggcatgttggtgttggctgcttttagtaacatatcctcaagctcagggttctttcctcacacatgtctaaactattgttgaactcctcaaggcatcctccatctttgttgtacatggtttttgtttgtttgcttacctgcttgatttttttttttttgctatacttgtagaagtcttttgattttgctttagaatgacgcctttctgtttactaaggatccatctgttactatatgccaattttttcatgatgaaatccttatcacattagtcatagttgttttgcattcccaacgtatgaattagagtgtcattgtcacatctggctttgttctatcctagtattgcttattatttcctcttttccctttcaacatgtctcattgttttttcttgagagggaacatagatgacgtgcttgggaaagggaccgtgataataggctgttagtaatagactggctatgctgtgttggactgtagagttctgtagctgcatagttatgttagagaaattacattttcggctgtgagcttttaaatggcaccagcttagttactttaggtagtacagactggttagagtgagttagcactaaatattactgtttcctaaagtcagttagtctgggcttttggaaaaaaaatctctaagttacaaatgataaaatagtctcactcaagatgggccttaaatgggagaccgtgctctggcctaacagaatgatcactgtcttgtggggtccttgaaagctagggaaacttcctctagtcttcctgtgaggtcactggaggctgacaggaattgtttccctctccatggtccacaatgagcccaggtcatcttctcagtgtagtgcttgtacttgctccctccagctgtctgcttgctggtttctgctggtctctgtgactgtatctgcttgcctttctctctggctctaggggcagagtcattcgttctatggttttacctttctgacagaaaatgtgttgcttacctttttacttaagatggagtgacttttcagttagtggtagcacatacctttaatcccagcacttgagattcctgtgaattcaaggccagcctggttcacagagtaagttccagaacaaccaaggctacacaaaagaccctgtctttaaaaaacaaaaacaaacaacaacacaacccaaaaagaatagcaatgttctctacaaatgaagacatctaaataggtgctggatttgttaaaagtgcaccccattctgcctttatagaatctggcgtgaggctgctgactcatttaacaatctgagtggcccatgtgtcttattaacaataaacagatgtgtcgacatatgagaggctcagttataatcacccatgaatctgatgtttcatttgattgtctgtcttggtttctggggaccacaaggaaacaagataattatagtgcacttccctctgccattaaagtgcagagaaggtgctttaaagggactgtgccccaactgcgctactcttgacacaatggaattcctgctcctacctagtttggcactgaatagctctccagattgtagtctgatttatgttgatctaaattttgcagagctgaggtgcattgaggttaataaaaacgttgactcatacttaggacacatctttaaagcttgtttgcaggaagtactcttagaaataagaagataattagtatgtgacaattactcaaccagacaaccttgttagggtacaaatcaattaagttccttgctgttgaaaaactggtcagacttaatacatgccagcactttgatgtgaggaaactagagcaatagacaaagggtttcaagctaaagaaagtatttattcattgcctctcaggccagtattatgccagcataagaactgagttttctgaaaatgtatttccttctggaggaaatgcagtgaactcatttacccctactaggtccattcaaggtcctttctgccaactatcctgtaatgaacttagcactcttccatcggtccactgtcactttcttttttcctcctgtacatcacctgcactgaccgattctgatttcttatttaacttatttaacattgcagtattggaaaaatcctaacatggtgaatgtgtatttgtatggcatggtctagcacagagatgggagcatgcagtgtgaaattcctccagattttaaaattaatgctttatctagtcattgaacaaaattattgtattatttatttataaggtacaataatatgtatgctcattcatttgctctcctatctgactgtctttcagtccacctcaatatttcttgagtacctttttaaagccaagtacacatgggtccttttattcctccattcttccagccatctcactttcccatcctttcaccctccaatctgactatcagctaatccaagtatttattatttaagtacaccattattccagatggagaaactgaaaaaacaatcaaaacggataaactatgcaacctttgttgaatttatattctttatgtaaatacaaagctacaagaaggagaaaataaatcattacaaaattcttcttcataacatttgtttattttcccaacaacaatgatttatataaattaccttgtagagctcttttgagggttaggaaggcaattattcttgtcactgtcctttaccagcttatcacaaaggcctacattattgccaagtaatttactcagtaaattattattatttccattggttgtggcccatgccaccattggagtttataagttattactagtctacaatgaaataagtatagagtctgtaaatatttagaaattcattttttaatttatttaaagtactgatttgcagttcattaaaaacagatggtttttcaccaaccacatatatgtaaagaacacttttcaaaaagaccattttctccttaaagaggtcaaacaataggaaataaaggggcagtgtgaacagcatgaaacaaatttaagtgttgcatatatactgcagcttattctgtgatcagttagtcattgcaaggaactgagcttatatcataacaaagaatgtgagctttgagggctacctggacaactgatctctgtaatgggaagtagccttaatctgatgctgtgctcttgcagctgtggtctttgcataatgagaacagtttaatatcctttttgcttcttagagtttccttcttgccagaagagtcatatgttagttagcatttgattcaaacattgctgagaagctgagtgatcttggctctcgactcaacctgaattctgtgagaatgtatactttactgaacatgcctgtatcttatcatcaggcctgaacttgacactgctcattccttaagggcagaatccatctgcctcttcaatgccggggcccaatccctggaccttgtacatgctagacaactgtacatgctccaccaatgaggaaataagtttagtccagggacagtaagtagtgttaggcctattttgagtaaacttcaagtttgtatccatattcaaaagtacatcgggcagcaggtccctgcttctggtttgagctgacgtgcatcaagatagactgtttttactcttccttgactttaaatggacactttctccctttttctcattagtaaaagtcagtggtcaatgaagcccacatcaggaatacagttctgtatggccagtttctgatttcagttgcagattatgatgagttccagatcagttccagatagtgatgagaattcggagtgtgtaaacaggcttacgtggctccatgagaagagaacccattccactgctttctgtccaaggagcagtgctgattggataataggtgctatccttggtgcaagagtaatgccatcactttctccttctaggtggggctcttaggaagaactggatcaggaaaaagtactttgctttcagcatttttacgaatgttgaacattaaaggtgatatagagattgatggtgtctcatggaattcagtgaccttacaagaatggaggaaagctttcggagtgataacacaggtgagcacaaaaatgtaaaaagcaatacgaattaacatttttatcattatttgacatacttaagaaattcatatcactctgcaaaatatatttggtgggtcctaccatctcgtctactgtgcaagagaactgtagcatatggaatgagagtacctcccaatgtctggaattctgcgtggtgtatatttcttaaagtgttttgatagtgttctcccaaagcacaatctgtaacagcagcctgggtagttccttgtgcaggcttcctagtcttgcttaagtacttgatctccgagggagtgatagcagcctgtagataaatgctttgcaagatgtggaagatgcttctgagatcataagctctcggaagcaggacatagtggaattgaaagttgaagtgcagtgatgttttccctttggagtctgagtaggaagaagtatgtcaggtcaatctagattcttataaagggcagtgtttgattcaggcagtacagcatctcgaacatcgccatttagtgctattctgtctgtgttactgcacatgctgatttcttgtgtagaggagaaacggcaatggttgcgggcaacatgacccaaatgtgaaccaagagatgctgaagccagaagaattgcagtatttctgctgctgttggcccttttctctgagacttttcctccttttgtgctactagacactaaatccaacccactaagatggctctttgaagcacttctgtatttttaacacaaaattaacattccgggactatcaccaggtagaccaactacaaagctagaccaagaaaatgcttgtacttcttgataaatgatcttcacagaacatttgctcctttcaagtggtgagacaatagatactgtaaccaccaaactgatgctttcaatttgtttctatggtgtgccatttttttcaaatgcttcatcttggctgaagttgtggaaacactgtgtgttcaaaaacacaaaagggattgtcagatggcctaaagaaaaagaaacgctaggagtacaaggttcctgaggtgagagcactagtcgagtaaaaatgctaaggccagtggaagggtgtggttgtctgagaagcactgctgttggacttgcccaggtcctgtgctgccagttgaactaaagcagggtaggctttgccttggttgctcttgttcgaacacattggcctacaagaagcgtcaacctctaaaacttctatcctcttgctcatcatcgtagctgctacacaatagaagggctccgtcttcctcactagctctgcttaggagcttacttatgccaggcacagagtacactgcagtgggccagagctggaaaatctcccctgcctttctgcctaaatgactcttcagacttgactcaattcatgtctgctcttttatggattcaaggcttacatttaaaaaaaaaaaaaagaaaaaaggaaaaaaaaaagtgtgttcagggcatccttcagaaatactgaagggtctctggaacatcagccagcatggttaacatgtctcagtgacaatttttgaatgtcatgtgaaacctaaggaaggaaggagagagagagagagagagagagagagagagagagagagagagagagagagagagagagcaaaccaagtccttatatgcttgatgtctaaactacgggttactttgcttttcctatcttttcttggaacgtgaggattgcagcatgcttctcctttccttagaaagataaaagaaggagaaaagtgaatatccacagaaaactaactagtttggtctgctttttcatcttttcttttctcctctgtctcctttaacaaggatgtacttcagaaggtcccacactgagctagtgtaatgttaaaggttcactggccactggttctcagatacatgaaacaggtattttgaaaagtaccctcttatacagagatccaaaagcatttgctgggcagtcacaaaaggtcctgttggtttggacggttcttaacaattttttccctccttttatagtttagtaactacatagcaatctcagaatacgtgcagcccagaattcagactatcatgtgcattccaaaacagagcctctttcatttgttctgagtcaagcagagcaggcagtgaagccgatagatggcatctgatttactttggcaattagagcaccaagaagaaagcacccactaatgctgcgcctggctaggcagataattaataaaaagcaactattttaaagcttcagttacaattttggaaggctgtaagttcttctgagtaaaggactagaagtttttccttttgttgattactattgtatgtggtatgtgtctgagaggaggggagaatgggtggggtattcatcacgtcatggctcacttggagaggtcagcacacaactttcaggaacaagttctccccttccagcatggcatttagacactggattcaggtcatcagggctgtgtggcaagcgtgagttatccactgagccatctcactggctccttttcttaatgaattgaaaatactcaccatccacccatcattctcaccacagacagaggtgaggcatcttttgttttgaaagagatcagacagcatgtatagatataaacagtgaaattggtggtgacagcttaaaattcactatataaaataattacatcttgtgcttacaattataatatcacagtcattttatttatatcaaatgtagagatactacttgccattaatatgccagagaagttccagtccaacctgtaaacttctaatgagaaactcaaaacgatgttcatagtcgtgtgacagaaattaaaaacagaaacagtaaagccaaagtgagtggctgagagttagtaatgaaaccatagctgcctgtaagctgtgggctaacaagggagtatataggcagagagaactgtccagattaagctagctgtcactcctgccagtacatctgtgtctttcctgtcctgctgttttgtctcccttcttttcttgttttctctctgattgcagaaaacatgtaactgtttactggttagacattatgaattgaggggttttctttctttgtttgttttgggggtatttttttaacacaaatactttgcttgactgcccaaacccagatgggatctcaaaccttgcttatgtatttctgcgtgtagttctaatatgtctcattttcaaattatccacatatctcccttaattatgcaagatttaaacagagtgaccagaaaatggaagcagagttataaaaagaaggatagaaatacatagtaaaatacttttcttctgagttttctccgttgtaagacatctaacataacaccttggatgagaagaattcaaaagacagtgttctatgctgaatcattaaatgttgctgtctctcacatgtgtggttctttcagcatttggaccctaatctgtataatcttaggacagctatataatttctctgtcatagtttccttgtttgtaaaatgagtatagtaataataacaattatttgtactttgggggaaattgaacgagaaatacttaaacttttacttcccacatggcttgataattatcctctgttatggtagttattatttttaattcagtgggggtggggagtcatgtctcctctgtctttctactggactgggggtatgttctatgaataagtatgaataagtatgaataaatgagcttgcacaatttcacaaagaaagttgtaatgaatacatgccatagagtgtcataaagtttataggtttagaatgattgggtacatggagttctaggcaggaagactgtgaacaatcaaaaggataggtcagtgtgaagggaaagggagaagggtcagagggaaccacagcttagagggtattagacgtcatggcatggtccagtaggaaggggctaattctcctgggctgaggaagggaatggagaacgtttggtggcacattgctatatacatgatgaactagcaaatgattatactgtgatgtggttaattagaacttactgaggtagacagttggacagagtgtagaattcaagggagggcagaaaaataactgtcatgtccaattttcaaattagtataacacaatttagctatttcagagactaaactttgaaacctttgattatatgctttggttagaaaacatttttatgtatctttggaaatgtttatactaaaactttgtagtataaaaactgttaggaagctgggcagtggcagcgcatgcctcggcagaggcagtcagatctctgaattcgaggccagcctggtttacagagtgagttctaggacagccagggctgcacatagaaaccttgtctcaaaaaaaaaaaaaaacaacaaagaaaaaacaacctgtaatgaagcactctggatttctagaaaactaaactttaactatcctgtatgcagtcttttatatttaaatcaatagcatatacactggtagtatagcaatctatatttgttacaaactgttaatagttcttagtagaaatatgtcattcataattttatagttgggccacatttcaagggaactattcatgatgtacacatacatacataagcaggggtagtcatttctcctattaatctattttatattaagtgcaatcaccacataagctggattacttttttttcatttgacatctagtactataaagcatattagctgttgcaacgatatatggtcagctgtgggaagtccatgtaggcttagccacttccacagagttgaggagtggaggcagcagctgcagggaggagatgggacatgtggggaacaatgatgatctctttgttctgcttagagtctcaagaactgctcattatagcatacatgacattaaataaatatcaaatatttgcttgccctaactgacttattagtgagtagtttcttttaagggcgacaggggatccctgggatgtgacagcttcaggtgcattttttaattggtgcacagcagatctgagagtgccatgctggccaaatcattccacttctcagggccttcattttgaatatgtaaaccagagagagagggtttaggttgacctccaaagacctttaggttagacagaggagtttgaggatgattaaacagcttaggaaacaagtaagacctctgctggcaccgtgaaggcaagggactgccagattctctttgaattaaaggaatggaatgtctgattgatggtatacaattgaattctagctgaaccggtttctttagttgatttttctttaaaattggatatgttgtccattaccttttaccagacatgaaattatgaaggaaagcctgcaagatttctgagttgtgataaatctaccacacctacagcttctagattcctgacagcttctttccttcataattttgaatgtgtatctgcttaaaataaattagttaaaacatcataaatttagtaaactagtatacattatagattttatgactaaaagttaaataatttctgaagcacccgtaggaatcttcacaggtgtattgggttgttagtgttacacttaaagaactgtgatagctgtgagcatttgggtcacatttagagatctctctctgtctctgtctctctctgtctctctgtctctcacacacacacacacacacacacacggagagggggagggaggagagaaaaagaggaggaggggagggaaggatgagagagagaactttattagccagaaaaatagccttatagaagttaactttcaaatctgaggaaaaacagcatttactctgattgttattattttctacttttacttcttcacgtctgctcactcatttgggacttttgctgagcttattcaaaatttgcatctaaaaaagaaagtaaagacatggccttcgacactcatagatatccacggacttagtaattttctttgatacacactaccgagattgggctccatcttcatatgtaacaaagaataactctgaaactctaatcctcttttttctatttcctgtgtgttggaattaagggcacatactacagtgccaagtttatatgcttctgggataagacccaaggcctcttgcaaattaagtaagcattttttgccaactgagccacatccccaccaactaaacttggtgttatttaaggaatgaaagtataagaaataattggggagcttgtttggtctgaggataaggaacagtgcccctaggaaatgaagcttgatttgaaacctgaaggatatagattgttgtgtgaagatcagggaggataagatttccagctgagaagaaaacttaggtgactaagctaagaaagtgtgtgcttagaatagaatggagtggaaaggagccctgagatcttgggaccatcgtaaggatattgtacccttagtgaaggggaaagtcattgacatttttcatgaattacttgggtatattgtaagagaagcaaaagtataaagaagaagatcaatttaggaagctcctgcagtgacacaaaaaggactagtgatagtttggcatgttcagtgggaacagaaattgagaaagaaattgatttgacatatagtttgaggataatataaatgaccaatgactcatttttaagataagctgaggaataagatgaattatgagtgactctcagttcctgatgtgcactgagatggagatgcagaaaggacaaaagtagggtggcatttctctgctttacaaagcatggggatgaaagagactgggttcctatgagcaactgtctgttttaaagataaaacatcttgtccattcctttcattcttccgggataatgaaattattctgtttgtcccaagtaaatatttctattgtatatttcaactaaatatataactctttcaaagttacagagatgcaaccaaaacaataagaggaaagaaaattattttagacattgacatcaaaaattttttgccagtcttgtatatataaagagtactaaatattatttttaaaatattattacctgagatctcttaagacagtggttttctcttaagcacatggtccacctaagtggaagtgttactgcaagtggagcatcttgacaatggtcatacagtgctatttgcacaccagagcatctgcctcttccctagcacacatgcccctgaacaaacggttgatctatgatcacatgggtttctgagttgtcctttcagcttctctttgttcatagaagtaagaagatgtgtaaagggatgttagtagaagaagagtctcaattcttcccagagcacagtggcctcaatttccttatctcaagggcattgaaataaaaaaaatccaaaaagagttttaaatgttgccctatttttctttaaaatgatgtaaagcaaatgtagaaaagtatgactagctaatgggtaccatagatgataggcagttttacacatctaccagtgtgtgtatgtgtgaatacagaaatgcatgtatactcaccttgtagcacagtgctctagtggatgctcatttgttccttttcttacttgaaattggtttgaataaagagaaaaacattaaaagatgtataggttatttatactttctaattatctttaccattgcagaaagtatttatcttttctggaacattcagacaaaacctggatcccaatggaaaatggaaagatgaagaaatatggaaagttgcagatgaggtaaggatgacaaataaagtagttttaaagaagtagatcatacacacaagtgtggttgccatagatgataggcagttttacacatctactggtgtgtgcatgtgtgaacacagaaatgcatgtatactcaccttgtagcacagtgctctcatttactggcacatccttgtcagaacctttgactcatccccctttcaggagtgtcgctcctttccatatactctattcgtggtgctttactaaagttctatagacccttgctcctagacgacgtatgtttctctcactattttgaagactgagaagtccaaggttaaggagccagcagacagtatttactatctgctaaggccctacttgctgtcactcccgaggtgtttttctgcacctcactcagtataagtggtcagtgagcgctgtggagcctcttttcattatagtgttaattccatctatggggtactcagagcccatgacctaatcacttcctaaacattttattttatgtctcagtagcactgccttggacagtcaggtgttaacatgagtttctgaagacatgcggacctagaactccctcctttcctcccctccaagttatgtcttgttcttatgaaaatagattactccacttaaacaaatgccaaagtcttaacacattttggtgtcagtgtacaactggaaatcacaaagtctcaattcagccaccatgagacttgggactttaggtttttcatgttggcattccaccattccctgcactttgcccattgttgttcccttgatgttcgctcttcggcctcccccagaacagatcttgccaggagctttgaagcctctgagtgctaaatgctaaccccttgagtaaccaaccttaaccttctcctaataaaatgaactgagattaaccgtttttcattatcagggtttccttattacccagcaaacacaaggtttttaaagaaaacattaactaaattgctagtgatatactgtaagatccttgatgtacttttacagagtgacctgtcagaatacagtgtgctgggagagagcttgggaaagaaggaattagcctttgtaaagcttaccaggtattgccaagtctccataaaatttgcaggaaactgagatcataaaatcatctaaaatgttaggagataggtttagaagactttagattccagaataatacaggtagttatgtgattagattttgtctaccagtccatctttagatgtacgttttcattggattctctttttaaatttatgttcataaagatgctgctcctgagctaaccgtaatgtcccatggtttgagtaagagtgacaaattttttgctgaagagtccacaaagaaacataaacaccaacccctagcttacagcagcaggcaggagatttaggttaaaggcaggaatcctaggctttaatcctgtatggttgatgatccaatatagtcaaataggaacacgttgaggtgtgtcagcctactaaggcactaggacaaaagtctaaccttcctgccctggttcatggcagcttgctgccctattcagctctggggatctttctttttttttttaatttttttatttaaaacaattttttaaatattttttattacatattttcctcaattacatttccaaagctatcccaaaagtcccccataccctccccccccacttccctacccacccattcccatttttttggccctggcgttcccctgtactggggcatatacagtttgcgtgtccaatgggcctctctttccagtgatggccaactaggccatcttttgatacctatgcagctagagtcaagagcttcggggtactggttagttcataatgttgttccacctatagggttgcagatccctttagctccttgggtactttctctagctcctccattgggagccctgtggtccatccaatagctgactgtgagcatccacttctgtgtttgctaggccccggcatagtctcacaagagacagctacatctgggtcctttcgataaaatcttgctagtgtatgcaatggctttctaaaggctgcatctttagcctacttctcacccctccctgtgctgctgctggacagggttcctgttgtacactgactgcttaaaggacctttatgatttggtctttgctgctctactttcagccccagcccccatgtgtcctgtgagtccactactgtgaattttaattttctttagagcacagtgtgctgctctctgttctatggtacgggttggggcagttgtttctgctttttaccttctggtttctggacctgggaaacccttgcagagcactactcctgctccttctcaccattcaagccttccttcacacatcactttgttctgaactccatcctgaccctcctgctttgggaaaagagactttcctaggtatagctatgcctcggctcctcaaaatttcctacactgaatcaaaattcacctcttggctactccatatctcctatgattatggaatcatgccctgctctctgttgttcctgcagtagttggatccctgggtggtttttgataagtactgactgaatgatctgagcaagtaaagaattcttttaactcatgtaaaatatgttgtgaaaatatcctcatgcttaatgcccaatagacattactaccttcatctcagtaaaggtcttgcaagatggctggcggattctgaaaagaactgcagccctgacttggggccctctgctgttttagccctactaagctatgtgatcttggccccttgactctggctcttagatgtggggactttgtttgtttgtttgtgtttccttattagaataatttttaaatttatcatctttacatcctaatagtcaagggaactgttgtagagacaatttaaatagcagaaacagggaccctgtaagtgggacatttccctgagaagtttgcagaatggaaacacaaggagctgagggtatccatttttacattgcccactagtgcttacaggcaaagcataatccaccttttttactgaaaaaaaaaaactgtcatagaaaacaaaaatcctacaaatacttctgagtagtttggtatagagtactgatttatctaaacatatttgaatacttttaactttgttatttgatggatggtcatagagttaaagatttacagagtacagtatataatttctgagctaaaactagcactaattcattcattcttaagttctaatgcttaaagactcatagtacatattaaatgaatgactgaaaggaagatgaatgaatgaatgaatggattaataaatatatgaatgaatgaatgaatgaatgaatgatgaattgttgaggctgagagtgttcctaactgaaaaacacatatttgctttcaagaaatgtatggtctaacagggaaaaaatacacaattctaatacaggatgcctggctgtcctgtgggtaggcaaggatatttaagagagtaatcagactgagcagaaggacaaaccctgagaatgttaagctgtataaagaattaaaagttgatgctgctggacacagtagtaggtgtgtgtgtgggggcggaggaggtcaggatgtcctgtgggccacatgagaacaattatattttatttttccagtaaaagaacttctgtaggatttaaaacagagaaatgatccaagttcaaacctgcattttagggagagctcttaaatatttctgtgacatgttgacaatttgactcattgatacttgcagtatgatgtttaagaaatgacagaaggccagacgaggatcagtgtgccagaactgacaaaaagaacggtttcagaaaccctgggggaacttctaggctggagagaggcattgaaagccattagcttaaacatacacattgatgccatgtacataaccaaaatctggacacaggaggggaggggacattggtgttgaaacctgatatggatgggacaaagctgtatagtatagtatcccctgtgatacaccaggcagtcttccttgtcttctgtgcctacattccctactatctcaggaaccttttaaacattaacgagtttacacaaagggtagttttaacaagccacatgtttgaacttccataatgagcacataagagtctggcattaacaatgatatgagccacttctgaactcatctccaaaatcatgaatctttcttaaggccttatctaactctgcacatgttagagtgatatgggtatatatcttacctgtacatacaaaattccagattcatgaagcacaagaaacaatcctgtctgtatttatttaactcttatacacctagtggttcttagcaaagaagacacaatgtacatgtattgaataaggaaaaaccaccaagacatctataattatgccttaattttgacagactactttttgatctttttattaaaccccctttaaaattgcagtttaaaaatataagccattaattctaaaataatcttcatattctaccctaacaataagagcctttaaattttagtcgtgttccatttttaactaagtaacttcttactttatgagaaagttatcagtttctcagattttataagtgaaggagataagtattatgatggcatgatttttttaaagcctcctcagctaattttcatgatatttctcatcctgtattacagatagaagatgaacatgtcatgctatgttttctaccctttctgctcttgaatcctttgccatcagttataatggagtgaataactgtgttctctatctgttatctttaaagcccatattgaattgtattgcaattgcatctatccatctatctatatctgtatctgtacctatccatctatataatgtgacaggaataggtataattgtttatcactgctagggaacatgacacttacaaggtgaacactgaatgattttgtaatcaagtgtggggctgaaagaaatcctccagtctgtttagagctaccgatattattgccagattttggttactcaaactaagtaggagttgggagttgagggtgatgtgaaatttattctgtgcaaactcatgtctgcttttagaatgcaagcctcttaagtgattttagttatgccccttctaagcacagtgtttttctttattttctacaggttggactcaagtctgtaatagagcagtttcctggacagctcaactttacccttgtggatgggggttatgtgctaagccatggccataagcaattaatgtgcttggcccgatcagttctcagtaaggccaagatcatactgcttgatgagcccagtgcccatctagaccccatgtaagttccaaaaatctttagataatcatgcaatagaagtagagtccttgaagttacctcatattggtacaaattcccattcagctaccacacctacaagtagggggtacaaaataattttccaggggaaaaatcactatttaacatgagcacaagtacttttttttttttcaacaagagctttgtttttcctcctgactggagtctggaatttataaacccttcaacctcattaacacataataaatacttagttaggtatgcacacacttatggcttccctctgtatcctatttatatcataaatacattaacagcacaaaataaataactgatgctgaatctacataaaatgtagtctcatttttatgaaattttcttctaagcatttgctttattagtgtatgaaattatattaaatacttagaatggcttaaaagctgattgtagctcattctgtatcatcattatcctaaaagtatttttaagtaaagaattaagtccatagaatactatacgtattgtcaaagataaaggcagaaaattcacactctataatgtcttatgtggtattttcttgctttgctagaacataccaagtcattcgacgagttctaaaacaagccttcgctggttgcacagtcatcctctgtgaacacaggatagaagcgatgttggattgccagcgatttttggtaagtcatttacacttgattgatatctcattctccatttatttaaataatcctgcacagctggatttgcacaccctttcttcacacttatgtcacacatttaccacctaccctcagtctctttccctggacttgagctatgaagtggtgaggaaatttagcacacttctctggtatcatatcactaaacgacactgtagataaggtaactatgctttcagatcttttgtggcgaacaagtcacaaaatgtacaattgaaaaaaaaaatgtctgtttcttacagtaactcagcttcccatggggaagataagggtgggccttaccattagtggttcaatgtagtaggagagaagcctgttccatcatccccattactactggaactcagggtagtgtccctgtcagacaccttctcattctccccccgcccccaaaaaaaagtcactgttcctgtttagacatgggaagttccaaggatcatgtaaaatttttactttcccaaggcttttgaatattctggaggtaaatgcttttttactgaagcacttttgatcctattgttattgcccagttacaagtgcctagagagtagatgcatctcttgttctgtggtggtcaagtacagggactaggtaaggggctctactctctgacctcaagcttgcaaacagtttaacatgcactgaaggcgttattctctgtcattcctggccaatttgaaacctttcggcctcaaccccaggtatgaggaagctcaaagttaatggttatatatagctcggtttaagagtgcgtgggtcattgattattttgctttgcaaagctccttcagttcctcaactgttctctgaaggatggcaacagctagtattacattaatttttcaaatccctatcgctactttcccggatgtgaaagctaagagaaaagtacaagctctgaatcctgtgctttctttggacttttgttcttctttgggcctggctcagtttatgtgtcagcactggcctgctcttcactcagaggtctcactaatgccctctcccttaggtcatagaagagagcaatgtctggcagtacgactcccttcaggcacttctgagtgagaagagtatcttccagcaggccattagctcctcggaaaagatgaggttcttccagggccgccactccagcaagcacaagcctcggacgcaaattactgctctgaaagaggagacagaagaagaagttcaagaaacccgtctctagtgctgggatgctgaggaagcaactcagtgcactgagtccattcccagaacccatgcagaatgaaaaaagccaggcatttcccatgcttctaaccccagtgctggggacacagagacaggtggatccctggggctctgtggcaagtgatcctagcccacaaagagagttccaggctgggcacctgagggacaatacctgtggatatactcttgcttccacatgcaagtacatatacacatgcatgcacattagtggacatacacacagaaaagcaaagaagaaggaaagagggaagaaaatagtgcaaataattgcaaaacgatcatgtatggagtctgctcatggacttagaggaggtgaactctactacctgtgcctttgaaagaagggtgaagcctgcgacttgctctttaagagactgttttggaagagagttcaaaaacgttcatatgggtatgggtaactgactttccagcagtagtcaaattgtttgaacttcagatagttgataatgaccacttgtgtattgcaaggcagatttttctgaaaacatttgccccctaatagtagctgaaaaagcagctataaatgccaaccaggttagtcattcggcttattgttcagtacagctggttaatttgcattattgaagaactgaaattatagtgcttagatataggacaaagtaaagagaactaaaaacagtgtcttatataactcaaagcccaacttactttcctctaagatatgtattgccttctatacattgtctgccccattccaagcaaatgttagaatattatacaaaatactgggtggtattgattgaaagatgcccgacatctggtgatctagtaacccatcaggattaaggatatccaggtcttggaaattaaggttaagaccatctagccttactaccgtacagctaaacattcttattaccagaataagacctaggaaaagaactgtttcagtcccataaagtggcctggataatttccttgatatggaaatcgacacacttatgttcccagaaagcaacagatctttaagacttctgaagtgaaggaaggttgtgttagtgcaaactagtgcagcccagtgccaggtccaggagttaacatgtagacaggccatggactgtgtgggtagatgctcatggaaatgtgcagtagtatgttcatgtgctctcagctagctgtgtgtacttcaaactgtctccacagagttgttggggagacactctgaaaaagaattaattgtgaattagttttatatactttgttttataatttgtgatgcaaatgaaaatttctctgggaaatatttattttagtaataatgtttcaaactcatatataacaatgctgtattttaagaatgattacataatgacttatatttgtataaaataatttttatatttgaaatgttaactttttatagcactagctattttaaaacaggggagtgaggaggacagggatgataaggatcattcaacttcatgttgtgaagacgagctgatgtaaatcttgtacccatctgtgtggttctcagacaacacatgctctcttttaatgcagctttgaagaagatggtaccaaaggttaagacggccccctgatgggcacatcaacttctgaactgcaaactaagctttagaggaatgtattatatttattactgtaatagaatatcatgtgtcaataaaatccttttatttgtgtga

SEQ ID NO: 148 - DNA, 6305 bp, Mus musculus
  source 1..6305: mol_type = genomic DNA
aattggaagcaaatgacatcacctcaggtctgagtaaaagggacgagccaaaagcattgacctggtcctggatatccagatgtcgagtccaacctgaatttagccgaacacagacctcattgcctcacggagacatcatgcagaagtcgcctttggagaaagccagctttatctccaaactcttcttcagctggaccacaccaattttgaggaaagggtacagacaccacttggagttgtcagacatataccaagccccttctgctgattcagctgaccacttgtctgaaaaactagaaagagaatgggacagagaacaagcttcaaaaaagaatccccagcttatccacgcccttcggcgatgctttttctggagattcctcttctatggaattttgctatacctaggggaagtcaccaaggctgtccagcctgtcttgctaggaagaatcatagcatcctatgatccagaaaacaaggtggaacgttccattgccatttaccttggcataggcttatgccttctcttcattgtcaggacactgcttcttcacccagctatttttggccttcatcgcattggaatgcagatgagaacagctatgtttagcttgatttataagaagactttaaagttgtcaagccgcgttcttgataaaataagtattggacaacttgttagtcttctttccaacaacctgaacaaatttgatgaaggacttgccttggcacattttatatggattgctcctttacaagtgactcttctgatggggcttctctgggacttgttacagttctcagccttctgtggccttggtttactgataatcctggttatttttcaagctatcctagggaagatgatggtgaagtacagagatcagagagctgcaaagatcaatgaaagactcgtgatcacatcagaaattattgataatatctattctgttaaggcatattgttgggaatcagcgatggagaaaatgattgaaaacttgagagaggtggagctgaaaatgacccggaaggcggcctatatgaggttcttcactagctctgccttcttcttttcagggttctttgtagtctttctatctgtgcttccctacacagtcatcaacggaatcgtcctacgaaaaatattcacaaccatttcattctgcattgtcctacgtatgtcagtcacacggcagttccccactgccgtacagatatggtatgattcttttggaatgataagaaaaatacaggatttcctgcagaaacaagagtataaagtactggagtataacttaatgaccacaggcataatcatggaaaatgtaacagcattttgggaggagggatttggggaattactggagaaagtacaacaaagcaatggtgacagaaaacattccagtgatgagaacaatgtcagtttcagtcatctctgccttgtgggaaatcctgtgctgaaaaacatcaatttgaatatagagaaaggagagatgttggctattactggatctactggatcaggaaagacatcactcctgatgttgattttgggagaactggaagcttcagagggaattattaagcacagtggaagagtttcattctgctctcaattttcttggattatgccgggtactatcaaagaaaatatcatctttggtgtttcctatgatgagtacagatataagagtgttgtcaaagcttgccaactacagcaggacatcaccaagtttgcagaacaagacaacacagttcttggagaaggtggagtcacactgagtggaggtcagcgtgcaaggatttctttagcaagagcagtatataaagatgctgatttgtacctattagattccccttttggatatctagatgtttttactgaagaacaagtatttgaaagctgtgtttgtaaattgatggccaacaaaactaggattttggttacatctaaaatggaacacttaaggaaagctgacaaaatactaattttgcatcagggcagtagctatttttatgggacattttctgagctacaaagtctacgtccagacttcagttcgaaactcatggggtatgatacttttgaccagtttactgaggaaagaagaagttcaattctaactgagaccttacgcaggttctcagtagacgattcctctgccccgtggagcaaacccaaacagtcgtttagacagactggagaggtgggagaaaaaaggaagaactctattctaaattcattcagctctgtaaggaaaatttccattgtgcaaaagactccattatgtatcgatggagagtctgatgatctccaagaaaagagactgtccctagttccggattctgaacagggggaggctgctctgccgcgcagcaacatgatcgccaccggccccacatttccaggcagaagaagacagtctgttttggatctgatgacgttcacacccaactcaggctccagcaatcttcagaggaccagaacttctattcgaaaaatctccttagtccctcagataagcttaaatgaagtggatgtatattcaaggagattatcgcaagatagcacactgaacatcactgaagaaattaacgaagaagatttaaaggagtgttttcttgatgatgtgatcaagatacccccggtgacaacatggaacacatacctacgatattttactctccataaaggcttactgctagtgctgatttggtgcgtactggtttttctggttgaggtggctgcttctttatttgtgttatggttgcttaaaaacaaccctgttaacagtggaaacaatggtactaaaatttccaatagctcctatgttgtgatcatcaccagtaccagtttctattatattttttacatttacgtgggagtggctgacactttgcttgccctgagcctcttcagaggtttgccgctggtgcatacgttaatcacagcatcaaaaattttgcacaggaaaatgttacactccattcttcacgcccctatgtcgaccatcagcaagctgaaagcaggtgggattcttaacagattctccaaagatatagcaattttggatgactttctgcctcttaccatttttgacttcattcagttggtgttcattgtgattggagctataatagtcgtctcggcattacaaccctacatcttcctagcaacggtgccagggctagtagtctttattttactgagggcctacttccttcatacagcacagcagctcaaacaactggaatctgaaggcaggagtccaattttcacccaccttgtgacaagcttaaaaggactctggacacttcgagccttccgacgccagacttactttgaaactctgttccacaaagctctgaatttgcacactgccaactggtttatgtatctggcaaccttgcgctggttccaaatgagaatagacatgatatttgtcctcttcttcattgttgttaccttcatctccattttaacaacaggtgaaggagaaggaacagctggtattattctaactttagctatgaatatcatgagtactttgcagtgggctgtgaactcaagcattgatacagatagcttgatgcgatctgtgagcagagtgtttaagtttattgatatacaaacagaagaaagtatgtacacacagataattaaagaactacctagagaaggatcatctgacgttttagtcattaagaatgagcatgtgaagaaaagtgatatctggccctctggaggcgaaatggttgtcaaagaccttactgtgaaatacatggatgatggaaatgccgtattagagaacatttctttttcaataagtcctggacagagggtggggctcttaggaagaactggatcaggaaaaagtactttgctttcagcatttttacgaatgttgaacattaaaggtgatatagagattgatggtgtctcatggaattcagtgaccttacaagaatggaggaaagctttcggagtgataacacagaaagtatttatcttttctggaacattcagacaaaacctggatcccaatggaaaatggaaagatgaagaaatatggaaagttgcagatgaggttggactcaagtctgtaatagagcagtttcctggacagctcaactttacccttgtggatgggggttatgtgctaagccatggccataagcaattaatgtgcttggcccgatcagttctcagtaaggccaagatcatactgcttgatgagcccagtgcccatctagaccccataacataccaagtcattcgacgagttctaaaacaagccttcgctggttgcacagtcatcctctgtgaacacaggatagaagcgatgttggattgccagcgatttttggtcatagaagagagcaatgtctggcagtacgactcccttcaggcacttctgagtgagaagagtatcttccagcaggccattagctcctcggaaaagatgaggttcttccagggccgccactccagcaagcacaagcctcggacgcaaattactgctctgaaagaggagacagaagaagaagttcaagaaacccgtctctagtgctgggatgctgaggaagcaactcagtgcactgagtccattcccagaacccatgcagaatgaaaaaagccaggcatttcccatgcttctaaccccagtgctggggacacagagacaggtggatccctggggctctgtggcaagtgatcctagcccacaaagagagttccaggctgggcacctgagggacaatacctgtggatatactcttgcttccacatgcaagtacatatacacatgcatgcacattagtggacatacacacagaaaagcaaagaagaaggaaagagggaagaaaatagtgcaaataattgcaaaacgatcatgtatggagtctgctcatggacttagaggaggtgaactctactacctgtgcctttgaaagaagggtgaagcctgcgacttgctctttaagagactgttttggaagagagttcaaaaacgttcatatgggtatgggtaactgactttccagcagtagtcaaattgtttgaacttcagatagttgataatgaccacttgtgtattgcaaggcagatttttctgaaaacatttgccccctaatagtagctgaaaaagcagctataaatgccaaccaggttagtcattcggcttattgttcagtacagctggttaatttgcattattgaagaactgaaattatagtgcttagatataggacaaagtaaagagaactaaaaacagtgtcttatataactcaaagcccaacttactttcctctaagatatgtattgccttctatacattgtctgccccattccaagcaaatgttagaatattatacaaaatactgggtggtattgattgaaagatgcccgacatctggtgatctagtaacccatcaggattaaggatatccaggtcttggaaattaaggttaagaccatctagccttactaccgtacagctaaacattcttattaccagaataagacctaggaaaagaactgtttcagtcccataaagtggcctggataatttccttgatatggaaatcgacacacttatgttcccagaaagcaacagatctttaagacttctgaagtgaaggaaggttgtgttagtgcaaactagtgcagcccagtgccaggtccaggagttaacatgtagacaggccatggactgtgtgggtagatgctcatggaaatgtgcagtagtatgttcatgtgctctcagctagctgtgtgtacttcaaactgtctccacagagttgttggggagacactctgaaaaagaattaattgtgaattagttttatatactttgttttataatttgtgatgcaaatgaaaatttctctgggaaatatttattttagtaataatgtttcaaactcatatataacaatgctgtattttaagaatgattacataatgacttatatttgtataaaataatttttatatttgaaatgttaactttttatagcactagctattttaaaacaggggagtgaggaggacagggatgataaggatcattcaacttcatgttgtgaagacgagctgatgtaaatcttgtacccatctgtgtggttctcagacaacacatgctctcttttaatgcagctttgaagaagatggtaccaaaggttaagacggccccctgatgggcacatcaacttctgaactgcaaactaagctttagaggaatgtattatatttattactgtaatagaatatcatgtgtcaataaaatccttttatttgtgtgaaa

SEQ ID NO: 149 - protein, 1476 aa, Mus musculus
MQKSPLEKASFISKLFFSWTTPILRKGYRHHLELSDIYQAPSADSADHLSEKLEREWDREQASKKNPQLIHALRRCFFWRFLFYGILLYLGEVTKAVQPVLLGRIIASYDPENKVERSIAIYLGIGLCLLFIVRTLLLHPAIFGLHRIGMQMRTAMFSLIYKKTLKLSSRVLDKISIGQLVSLLSNNLNKFDEGLALAHFIWIAPLQVTLLMGLLWDLLQFSAFCGLGLLIILVIFQAILGKMMVKYRDQRAAKINERLVITSEIIDNIYSVKAYCWESAMEKMIENLREVELKMTRKAAYMRFFTSSAFFFSGFFVVFLSVLPYTVINGIVLRKIFTTISFCIVLRMSVTRQFPTAVQIWYDSFGMIRKIQDFLQKQEYKVLEYNLMTTGIIMENVTAFWEEGFGELLEKVQQSNGDRKHSSDENNVSFSHLCLVGNPVLKNINLNIEKGEMLAITGSTGSGKTSLLMLILGELEASEGIIKHSGRVSFCSQFSWIMPGTIKENIIFGVSYDEYRYKSVVKACQLQQDITKFAEQDNTVLGEGGVTLSGGQRARISLARAVYKDADLYLLDSPFGYLDVFTEEQVFESCVCKLMANKTRILVTSKMEHLRKADKILILHQGSSYFYGTFSELQSLRPDFSSKLMGYDTFDQFTEERRSSILTETLRRFSVDDSSAPWSKPKQSFRQTGEVGEKRKNSILNSFSSVRKISIVQKTPLCIDGESDDLQEKRLSLVPDSEQGEAALPRSNMIATGPTFPGRRRQSVLDLMTFTPNSGSSNLQRTRTSIRKISLVPQISLNEVDVYSRRLSQDSTLNITEEINEEDLKECFLDDVIKIPPVTTWNTYLRYFTLHKGLLLVLIWCVLVFLVEVAASLFVLWLLKNNPVNSGNNGTKISNSSYVVIITSTSFYYIFYIYVGVADTLLALSLFRGLPLVHTLITASKILHRKMLHSILHAPMSTISKLKAGGILNRFSKDIAILDDFLPLTIFDFIQLVFIVIGAIIVVSALQPYIFLATVPGLVVFILLRAYFLHTAQQLKQLESEGRSPIFTHLVTSLKGLWTLRAFRRQTYFETLFHKALNLHTANWFMYLATLRWFQMRIDMIFVLFFIVVTFISILTTGEGEGTAGIILTLAMNIMSTLQWAVNSSIDTDSLMRSVSRVFKFIDIQTEESMYTQIIKELPREGSSDVLVIKNEHVKKSDIWPSGGEMVVKDLTVKYMDDGNAVLENISFSISPGQRVGLLGRTGSGKSTLLSAFLRMLNIKGDIEIDGVSWNSVTLQEWRKAFGVITQKVFIFSGTFRQNLDPNGKWKDEEIWKVADEVGLKSVIEQFPGQLNFTLVDGGYVLSHGHKQLMCLARSVLSKAKIILLDEPSAHLDPITYQVIRRVLKQAFAGCTVILCEHRIEAMLDCQRFLVIEESNVWQYDSLQALLSEKSIFQQAISSSEKMRFFQGRHSSKHKPRTQITALKEETEEEVQETRL

SEQ ID NO: 150 - DNA, 25 bp, synthetic construct
  misc_feature 1..25: note = Synthetic oligonucleotide
  source 1..25: mol_type = other DNA
cctttcagggtgtcttactcaccat

SEQ ID NO: 151 - DNA, 25 bp, synthetic construct
  misc_feature 1..25: note = Synthetic oligonucleotide
  source 1..25: mol_type = other DNA
cctcttacctcagttacaatttata

SEQ ID NO: 152 - DNA, 17 bp, synthetic construct
  misc_feature 1..17: note = Synthetic oligonucleotide
  source 1..17: mol_type = other DNA
ccaaaccatacaagaat

SEQ ID NO: 153 - DNA, 18 bp, synthetic construct
  misc_feature 1..18: note = Synthetic oligonucleotide
  source 1..18: mol_type = other DNA
gatcactccactgttcat

SEQ ID NO: 154 - DNA, 27 bp, synthetic construct
  misc_feature 1..27: note = Synthetic oligonucleotide
  source 1..27: mol_type = other DNA
tggcaccattaaagaaaatatcatctt

SEQ ID NO: 155 - DNA, 22 bp, synthetic construct
  misc_feature 1..22: note = Synthetic oligonucleotide
  source 1..22: mol_type = other DNA
ctcagtgtgattccaccttctc

SEQ ID NO: 156 - DNA, 20 bp, synthetic construct
  misc_feature 1..20: note = Synthetic oligonucleotide
  source 1..20: mol_type = other DNA
aaagacctgtacgccaacac

SEQ ID NO: 157 - DNA, 21 bp, synthetic construct
  misc_feature 1..21: note = Synthetic oligonucleotide
  source 1..21: mol_type = other DNA
gtcatactcctgcttgctgat

SEQ ID NO: 158 - DNA, 24 bp, synthetic construct
  misc_feature 1..24: note = Synthetic oligonucleotide
  misc_feature 1: note = 5' 6-FAM (Fluorescein)
  misc_feature 9..10: note = ZEN
  misc_feature 24: note = 3' Iowa Black FQ
  source 1..24: mol_type = other DNA
acagaagcgtcatcaaagcatgcc

SEQ ID NO: 159 - DNA, 21 bp, synthetic construct
  misc_feature 1..21: note = Synthetic oligonucleotide
  misc_feature 1: note = 5' HEX
  misc_feature 9..10: note = ZEN
  misc_feature 21: note = 3' Iowa Black FQ
  source 1..21: mol_type = other DNA
tcatccatggtgagctggcgg

SEQ ID NO: 160 - DNA, 18 bp, synthetic construct
  misc_feature 1..18: note = Synthetic oligonucleotide
  source 1..18: mol_type = other DNA
gcgctggccggggctgat

SEQ ID NO: 161 - DNA, 27 bp, synthetic construct
  misc_feature 1..27: note = Synthetic oligonucleotide
  source 1..27: mol_type = other DNA
aaggtgttcatcttcagcggcaccttc

SEQ ID NO: 162 - DNA, 23 bp, synthetic construct
  misc_feature 1..23: note = Synthetic oligonucleotide
  source 1..23: mol_type = other DNA
tgcagcagtgacgcaaaggcctt

SEQ ID NO: 163 - DNA, 18 bp, synthetic construct
  misc_feature 1..18: note = Synthetic oligonucleotide
  source 1..18: mol_type = other DNA
gggtgatgctgtcccagc

SEQ ID NO: 164 - DNA, 30 bp, synthetic construct
  misc_feature 1..30: note = Synthetic oligonucleotide
  source 1..30: mol_type = other DNA
gcctggcaccattaaagaaaatatcattgg

SEQ ID NO: 165 - DNA, 30 bp, synthetic construct
  misc_feature 1..30: note = Synthetic oligonucleotide
  source 1..30: mol_type = other DNA
gcctggcaccattaaagaaaatatcatctt

SEQ ID NO: 166 - DNA, 20 bp, synthetic construct
  misc_feature 1..20: note = Synthetic oligonucleotide
  source 1..20: mol_type = other DNA
tccaggagacaggagcatct

SEQ ID NO: 167 - DNA, 19 bp, synthetic construct
  misc_feature 1..19: note = Synthetic oligonucleotide
  source 1..19: mol_type = other DNA
gttctatcacagatctgag

SEQ ID NO: 168 - DNA, 26 bp, synthetic construct
  misc_feature 1..26: note = Synthetic oligonucleotide
  source 1..26: mol_type = other DNA
ggcaccattaaagaaaatatcattgg

SEQ ID NO: 169 - DNA, 21 bp, synthetic construct
  misc_feature 1..21: note = Synthetic oligonucleotide
  source 1..21: mol_type = other DNA
ctcagtgtgattccaccttct

SEQ ID NO: 170 - DNA, 21 bp, synthetic construct
  misc_feature 1..21: note = Synthetic oligonucleotide
  source 1..21: mol_type = other DNA
gcgatgtcaataggactccag

SEQ ID NO: 171 - DNA, 22 bp, synthetic construct
  misc_feature 1..22: note = Synthetic oligonucleotide
  source 1..22: mol_type = other DNA
ttgttgtaggatatgcccttga

SEQ ID NO: 172 - DNA, 24 bp, synthetic construct
  misc_feature 1..24: note = Synthetic oligonucleotide
  misc_feature 1: note = 5' 6-FAM (Fluorescein)
  misc_feature 9..10: note = ZEN
  misc_feature 24: note = 3' Iowa Black FQ
  source 1..24: mol_type = other DNA
acagaagcgtcatcaaagcatgcc

SEQ ID NO: 173 - DNA, 31 bp, synthetic construct
  misc_feature 1..31: note = Synthetic oligonucleotide
  misc_feature 1: note = 5' HEX
  misc_feature 9..10: note = ZEN
  misc_feature 31: note = 3' Iowa Black FQ
  source 1..31: mol_type = other DNA
agcctaagatgagagttcaagttgagtttgg

SEQ ID NO: 174 - DNA, 25 bp, synthetic construct
  source 1..25: mol_type = other DNA
agcccaacctgcagttagagaagat

SEQ ID NO: 175 - DNA, 25 bp, synthetic construct
  source 1..25: mol_type = other DNA
tcttcgccttactgagaacagatct

SEQ ID NO: 176 - DNA, 25 bp, synthetic construct
  source 1..25: mol_type = other DNA
agaacatctgaaactcacactggat

SEQ ID NO: 177 - DNA, 25 bp, synthetic construct
  source 1..25: mol_type = other DNA
ctggatccaaatgagcactgggtta

SEQ ID NO: 178 - DNA, 25 bp, synthetic construct
  source 1..25: mol_type = other DNA
tactgtgcaatcagcaaatgcttgt

SEQ ID NO: 179 - DNA, 25 bp, synthetic construct
  source 1..25: mol_type = other DNA
cctgtgttcacagagaattactgtg

SEQ ID NO: 180 - DNA, 25 bp, synthetic construct
  source 1..25: mol_type = other DNA
tccagcattgcttctatcctgtgtt

SEQ ID NO: 181 - DNA, 25 bp, synthetic construct
  source 1..25: mol_type = other DNA
gttataaagactcaccaaaaattgt

SEQ ID NO: 182 - DNA, 25 bp, synthetic construct
  source 1..25: mol_type = other DNA
cctcttaggtcagttacaatttata

SEQ ID NO: 183 - DNA, 18 bp, synthetic construct
  source 1..18: mol_type = other DNA
atgcagcgcagccccctc

SEQ ID NO: 184 - DNA, 18 bp, synthetic construct
  source 1..18: mol_type = other DNA
accctgaagctgagcagc

SEQ ID NO: 185 - DNA, 18 bp, synthetic construct
  source 1..18: mol_type = other DNA
ctcctcccagaaggcggt

SEQ ID NO: 186 - DNA, 18 bp, synthetic construct
  source 1..18: mol_type = other DNA
gaccgagctgaagctgac

SEQ ID NO: 187 - DNA, 18 bp, synthetic construct
  source 1..18: mol_type = other DNA
ctcctccagctggcaggc

SEQ ID NO: 188 - DNA, 18 bp, synthetic construct
  source 1..18: mol_type = other DNA
gacttcctgcagaagcag

SEQ ID NO: 189 - DNA, 18 bp, synthetic construct
  source 1..18: mol_type = other DNA
catcagcttgcacacgca

SEQ ID NO: 190 - DNA, 18 bp, synthetic construct
  source 1..18: mol_type = other DNA
gcaaagtgagcctggccc

SEQ ID NO: 191 - DNA, 26 bp, synthetic construct
  source 1..26: mol_type = other DNA
cctcgctctccagctgcttcagctgc

SEQ ID NO: 192 - DNA, 18 bp, synthetic construct
  source 1..18: mol_type = other DNA
gcgagggcgagggccgcg

SEQ ID NO: 193 - DNA, 18 bp, synthetic construct
  source 1..18: mol_type = other DNA
acggggtccaggtgggcg

SEQ ID NO: 194 - DNA, 20 bp, synthetic construct
  source 1..20: mol_type = other DNA
gcaggcacccagagtagtag

SEQ ID NO: 195 - DNA, 20 bp, synthetic construct
  source 1..20: mol_type = other DNA
gccagctctctatcccattc

SEQ ID NO: 196 - DNA, 20 bp, synthetic construct
  source 1..20: mol_type = other DNA
gggatagagagctggcttca

SEQ ID NO: 197 - DNA, 21 bp, synthetic construct
  source 1..21: mol_type = other DNA
ttgttcaggttgttggaaagg

SEQ ID NO: 198 - DNA, 20 bp, synthetic construct
  source 1..20: mol_type = other DNA
caaggaggaacgctctatcg

SEQ ID NO: 199 - DNA, 20 bp, synthetic construct
  source 1..20: mol_type = other DNA
aggcagacgcctgtaacaac

SEQ ID NO: 200 - DNA, 20 bp, synthetic construct
  source 1..20: mol_type = other DNA
atggggctaatctgggagtt

SEQ ID NO: 201 - DNA, 20 bp, synthetic construct
  source 1..20: mol_type = other DNA
ctgccttccgagtcagtttc

SEQ ID NO: 202 - DNA, 20 bp, synthetic construct
  source 1..20: mol_type = other DNA
tcaccaccatctcattctgc

SEQ ID NO: 203 - DNA, 21 bp, synthetic construct
  source 1..21: mol_type = other DNA
aagaagaggctgtcatcacca

SEQ ID NO: 204 - DNA, 20 bp, synthetic construct
  source 1..20: mol_type = other DNA
taacagccttctgggaggag

SEQ ID NO: 205 - DNA, 20 bp, synthetic construct
  source 1..20: mol_type = other DNA
ggcatgctttgatgacgctt

SEQ ID NO: 206 - DNA, 20 bp, synthetic construct
  source 1..20: mol_type = other DNA
ctaatggtgatgacagcctc

SEQ ID NO: 207 - DNA, 20 bp, synthetic construct
  source 1..20: mol_type = other DNA
gctcgttgacctccactcag

SEQ ID NO: 208 - DNA, 20 bp, synthetic construct
  source 1..20: mol_type = other DNA
cactgagtggaggtcaacga

SEQ ID NO: 209 - DNA, 20 bp, synthetic construct
  source 1..20: mol_type = other DNA
tccaggagacaggagcatct

SEQ ID NO: 210 - DNA, 20 bp, synthetic construct
  source 1..20: mol_type = other DNA
aggaggcagtctgtcctgaa

SEQ ID NO: 211 - DNA, 20 bp, synthetic construct
  source 1..20: mol_type = other DNA
cagcacaaccaaagaagcag

SEQ ID NO: 212 - DNA, 17 bp, synthetic construct
  source 1..17: mol_type = other DNA
cagtgccagtgatagtg

SEQ ID NO: 213 - DNA, 18 bp, synthetic construct
  source 1..18: mol_type = other DNA
ctcttccttctccttctc

SEQ ID NO: 214 - DNA, 20 bp, synthetic construct
  source 1..20: mol_type = other DNA
gggctgtaaactccagcata

SEQ ID NO: 215 - DNA, 18 bp, synthetic construct
  source 1..18: mol_type = other DNA
gacacaccatcgatctgg

SEQ ID NO: 216 - DNA, 17 bp, synthetic construct
  source 1..17: mol_type = other DNA
ccaaaccatacaagaat

SEQ ID NO: 217 - DNA, 18 bp, synthetic construct
  source 1..18: mol_type = other DNA
gatcactccactgttcat

SEQ ID NO: 218 - DNA, 20 bp, synthetic construct
  source 1..20: mol_type = other DNA
gggaagagtactttgttatc

SEQ ID NO: 219 - DNA, 19 bp, synthetic construct
  source 1..19: mol_type = other DNA
gttctatcacagatctgag

SEQ ID NO: 220 - DNA, 18 bp, synthetic construct
  source 1..18: mol_type = other DNA
cttggatccctatgaaca

SEQ ID NO: 221 - DNA, 18 bp, synthetic construct
  source 1..18: mol_type = other DNA
ctaaagccttgtatcttg

SEQ ID NO: 222 - DNA, 23 bp, synthetic construct
  source 1..23: mol_type = other DNA
ctgaagaacagcttgctcaccac

SEQ ID NO: 223 - DNA, 18 bp, synthetic construct
  source 1..18: mol_type = other DNA
cgagtgggaccgcgagct

SEQ ID NO: 224 - DNA, 19 bp, synthetic construct
  source 1..19: mol_type = other DNA
gcccaggtacaggaagatg

SEQ ID NO: 225 - DNA, 18 bp, synthetic construct
  source 1..18: mol_type = other DNA
accctgaagctgagcagc

SEQ ID NO: 226 - DNA, 32 bp, synthetic construct
  source 1..32: mol_type = other DNA
cttcttgtagatcaggctgaacatggcgatgc

SEQ ID NO: 227 - DNA, 18 bp, synthetic construct
  source 1..18: mol_type = other DNA
ggcctggccctggcccac

SEQ ID NO: 228 - DNA, 19 bp, synthetic construct
  source 1..19: mol_type = other DNA
cggtacttcatcatcatgc

SEQ ID NO: 229 - DNA, 18 bp, synthetic construct
  source 1..18: mol_type = other DNA
gaccgagctgaagctgac

SEQ ID NO: 230 - DNA, 20 bp, synthetic construct
  source 1..20: mol_type = other DNA
ctggatcttgttgatggcgc

SEQ ID NO: 231 - DNA, 18 bp, synthetic construct
  source 1..18: mol_type = other DNA
ggcttcggcgagctgttc

SEQ ID NO: 232 - DNA, 18 bp, synthetic construct
  source 1..18: mol_type = other DNA
ctcctcccagaaggcggt

SEQ ID NO: 233 - DNA, 18 bp, synthetic construct
  source 1..18: mol_type = other DNA
accagcctgctgatggtg

SEQ ID NO: 234 - DNA, 18 bp, synthetic construct
  source 1..18: mol_type = other DNA
cttgccggcgccggtgct

SEQ ID NO: 235 - DNA, 30 bp, synthetic construct
  source 1..30: mol_type = other DNA
gacatcagcaagttcgccgagaaggacaac

SEQ ID NO: 236 - DNA, 18 bp, synthetic construct
  source 1..18: mol_type = other DNA
cgggccaggctgatgcgg

SEQ ID NO: 237 - DNA, 21 bp, synthetic construct
  source 1..21: mol_type = other DNA
ctgcgtgtgcaagctgatggc

SEQ ID NO: 238 - DNA, 25 bp, synthetic construct
  source 1..25: mol_type = other DNA
cttcaggtcctcctcgttgatctcc

SEQ ID NO: 239 - DNA, 18 bp, synthetic construct
  source 1..18: mol_type = other DNA
gtggccgccagcctggtg

SEQ ID NO: 240 - DNA, 26 bp, synthetic construct
  source 1..26: mol_type = other DNA
cctcgctctccagctgcttcagctgc

SEQ ID NO: 241 - DNA, 18 bp, synthetic construct
  source 1..18: mol_type = other DNA
gcgagggcgagggccgcg

SEQ ID NO: 242 - DNA, 23 bp, synthetic construct
  source 1..23: mol_type = other DNA
caggctgtccacgtcgatgctgc

SEQ ID NO: 243 - DNA, 18 bp, synthetic construct
  source 1..18: mol_type = other DNA
gtgggcctgctgggccgc

SEQ ID NO: 244 - DNA, 18 bp, synthetic construct
  source 1..18: mol_type = other DNA
gcgctggccggggctgat

SEQ ID NO: 245 - DNA, 27 bp, synthetic construct
  source 1..27: mol_type = other DNA
aaggtgttcatcttcagcggcaccttc

SEQ ID NO: 246 - DNA, 20 bp, synthetic construct
  source 1..20: mol_type = other DNA
ctgggggatcacgccgaagg

SEQ ID NO: 247 - DNA, 18 bp, synthetic construct
  source 1..18: mol_type = other DNA
gtgggcctgcgcagcgtg

SEQ ID NO: 248 - DNA, 22 bp, synthetic construct
  source 1..22: mol_type = other DNA
gtgatcgaggagaacaaggtgc

SEQ ID NO: 249 - DNA, 18 bp, synthetic construct
  source 1..18: mol_type = other DNA
ctcgtcggccaccttcca

SEQ ID NO: 250 - DNA, 84 bp, synthetic construct
  source 1..84: mol_type = other DNA
gatggtgtgtcttgggattcaataactttgcaacagtgaaggaaagcctttggagtgataccacaggtgagcaaaaggacttag

SEQ ID NO: 251 - DNA, 78 bp, synthetic construct
  source 1..78: mol_type = other DNA
gtgggcctcttgggaagaactggatcagggaagagtactttgttatcagcttttttgagactactgaacactgaagga

SEQ ID NO: 252 - DNA, 78 bp, synthetic construct
  source 1..78: mol_type = other DNA
gaaatccagatcgatggtgtgtcttgggattcaataactttgcaacagtggaggaaagcctttggagtgataccacag

SEQ ID NO: 253 - DNA, 78 bp, synthetic construct
  source 1..78: mol_type = other DNA
gaaatccagatcgatggtgtgtcttgggattcaataactttgcaacagtgaaggaaagcctttggagtgataccacag

SEQ ID NO: 254 - DNA, 19 bp, synthetic construct
  source 1..19: mol_type = other DNA
cggtacttcatcatcatgc
